(19) United States
(12) Patent Application Publication
(10) Pub. No.: US 2025/0188476 A1
(43) Pub. Date: Jun. 12, 2025

(54) COMPOUNDS AND METHODS FOR REDUCING IFNAR1 EXPRESSION

(71) Applicant: Ionis Pharmaceuticals, Inc., Carlsbad, CA (US)

(72) Inventors: Fredrik Carl Kamme, Encinitas, CA (US); Huynh-Hoa Bui, San Diego, CA (US); Susan M. Freier, San Diego, CA (US); Swagatam Mukhopadhyay, Oceanside, CA (US)

(73) Assignee: Ionis Pharmaceuticals, Inc., Carlsbad, CA (US)

(21) Appl. No.: 18/570,839

(22) PCT Filed: Jun. 17, 2022
(86) PCT No.: PCT/US2022/033936

§ 371 Date: Dec. 15, 2023

Related U.S. Application Data
(60) Provisional application No. 63/212,476, filed on Jun. 18, 2021.

(51) Int. Cl. C12N 15/113; A61P 37/06

(52) U.S. Cl. CPC C12N 15/1138; A61P 37/06; C12N 2310/11; C12N 2310/14; C12N 2310/315; C12N 2310/321; C12N 2310/3341; C12N 2310/3519

(57) ABSTRACT

Provided are oligomeric agents, oligomeric compounds, methods, and pharmaceutical compositions for reducing the amount or activity of IFNAR1 RNA in a cell or an animal, and in certain instances, reducing the amount of IFNAR1 protein in a cell or animal. Such oligomeric agents, oligomeric compounds, methods, and pharmaceutical compositions are useful to treat diseases and conditions associated with neuroinflammation, including Aicardi-Goutieres Syndrome, stroke, neuropsychiatric systemic lupus erythematosus, neuroinflammation following traumatic brain injury, neuro-autoimmune disorders, Alzheimer's disease, post-operative delirium and cognitive decline, cranial radiation-induced cognitive decline, viral infection-induced cognitive decline, neuromyelitis optica, and ataxia telangiectasia.

### SEQUENCE LISTING

[0001] The present application is being filed along with a Sequence Listing in electronic format. The Sequence Listing is provided as a file entitled BIOL0416WOSEQ_ST25.txt, created on Jun. 8, 2022, which is 589 KB in size. The information in the electronic format of the sequence listing is incorporated herein by reference in its entirety.

### FIELD

[0002] Provided are oligomeric agents, oligomeric compounds, methods, and pharmaceutical compositions for reducing the amount or activity of IFNAR1 RNA in a cell or animal, and in certain instances reducing the amount of IFNAR1 protein in a cell or animal. Such oligomeric agents, oligomeric compounds, methods, and pharmaceutical compositions are useful to treat neurological diseases or conditions associated with neuroinflammation, including Aicardi-Goutières Syndrome, stroke, neuropsychiatric systemic lupus erythematosus, neuroinflammation following traumatic brain injury, neuro-autoimmune disorders, Alzheimer's disease, post-operative delirium and cognitive decline, cranial radiation-induced cognitive decline, viral infection-induced cognitive decline, neuromyelitis optica, and ataxia telangiectasia.

### BACKGROUND

[0003] Aicardi-Goutières Syndrome (AGS) is a progressive inflammatory encephalopathy associated with several neuropathological manifestations, including seizures, difficulty feeding, dystonia, spasticity, delayed motor development, delayed language development, and delayed social skill development. Imaging of AGS patients reveals white matter abnormalities, T cell infiltration, B cell infiltration, striatal necrosis, brain atrophy, basal ganglia calcification, and microencephaly; patients also have elevated levels of interferon alpha (IFNa) and lymphocytosis in cerebrospinal fluid. AGS has been associated with mutations in one of ten genes: TREX1 (DNA exonuclease), RNASEH2A, B or C (subunits of RNASEH2), SAMHD1 (dNTP hydrolase), ADAR1 (RNA editing enzyme), MDA5 (dsRNA sensor), USP18 (negative regulator of type I IFN signaling), LSM11 and RNU7-1 (components of the replication-dependent histone pre-mRNA-processing complex). Mutations in any one of these genes lead to aberrant activation of the antiviral response and high levels of IFNa (Adang, et al., 2020, J. Child Neurol., 35, 7016; Rodero, et al., 2016, J. Esp. Med., 213, 2527-2538).

[0004] Interferon Alpha and Beta Receptor Subunit 1 (IFNAR1) is one of two components of the interferon alpha receptor, involved in type I interferon signaling. Type I interferon signaling is elevated in AGS patients and is believed to be a key mediator of neuropathology. Elevated levels of type I interferon signaling are also associated with diseases or conditions such as neuroinflammation associated with stroke, brain injury, Alzheimer's disease, neuropsychiatric systemic lupus erythematosus, neuromyelitis optica, post-operative delirium and cognitive decline, cranial radiation-induced cognitive decline, viral infection-induced cognitive decline, and ataxia telangectasia (Wlodarczyk, et al., 2021, Glia 69, 943-953; Santer, et al., 2009, J. Immunol. 182, 1192-1201; Zeng, et al., 2019, Arthritis Res. Ther. 21, 205.017; Karageorgas, et al., 2011, J Biomed Biotechnol 2011, 273907; Roy, et al., 2020, J Clin Invest. 130, 1912-1930; Witcher, 2021, J. Neurosci. JN-RM-2469-2420; Blank, et al., 2016, Immunity 44, 901-912; Härtlova, et al., 2015, Immunity 44, 901-912; McDonugh, et al., 2017, J Neurosci. 37, 8292-8308). Over-expression of IFNa in transgenic mice leads to elevated levels of type I interferon signaling, resulting in neurodegenerative changes, T cell infiltration, B cell infiltration, microglial cell activation, reactive astrocytosis, activation of endothelial cells, and calcification of the thalamus and cerebellum (Hofer, et al., 2013, Cytokine & Growth Factor Reviews 24, 257-267; Klok, et al., 2015, Ann. Clin. Transl. Neurol., 2, 774-779). Type I interferon signaling induces expression of hundreds of genes, including Interferon Induced Protein with Tetratricopeptide Repeats 1 (Ifit1), Interferon Induced Protein with Tetratricopeptide Repeats 3 (Ifit 3), and Interferon Regulatory Factor 7 (Irf7) (Li, et al., 2018, J. Biol. Chem. 292, P5845-P5859). Crossing a mouse model of Alzheimer's disease with an IFNAR1 knockout mouse suppressed type I interferon signaling, resulted in a glial cell anti-inflammatory response, and reduced neuroinflammation (Minter, M. R., et al., 2016, Acta Neuropathologica Commun. 4:72).

### SUMMARY

[0005] Oligomeric agents, oligomeric compounds, methods, and pharmaceutical compositions of certain embodiments described herein are useful for reducing or inhibiting IFNAR1 expression in a cell or animal. In certain embodiments, IFNAR1 RNA or protein levels can be reduced in a cell or animal. In certain embodiments, the subject has Aicardi-Goutières Syndrome. In certain embodiments, the subject has a disease or disorder associated with a mutation in TREX1, RNASEH2A, RNASEH2B, RNASEH2C, SAMHD1, ADAR1, MDA5, USP18, LSM11, or RNU7-1.

[0006] Also provided are methods of treating a disease or disorder associated with elevated type I interferon signaling, in certain embodiments, the disease or disorder is AGS, stroke, epilepsy, neuroinflammation following traumatic brain injury, neuro-autoimmune disorders, Alzheimer's disease, post-operative delirium and cognitive decline, cranial radiation-induced cognitive decline, viral infection-induced cognitive decline, neuromyelitis optica, or ataxia telangectasia.

### DETAILED DESCRIPTION

[0007] It is to be understood that both the foregoing general description and the following detailed description are exemplary and explanatory only and are not restrictive. Herein, the use of the singular includes the plural unless specifically stated otherwise. As used herein, the use of “or” means “and/or” unless stated otherwise. Furthermore, the use of the term “including” as well as other forms, such as “includes” and “included”, is not limiting. Also, terms such as “element” or “component” encompass both elements and components comprising one unit and elements and components that comprise more than one subunit, unless specifically stated otherwise.

[0008] The section headings used herein are for organizational purposes only and are not to be construed as limiting the subject matter described. All documents, or portions of documents, cited in this application, including, but not limited to, patents, patent applications, articles, books, and treatises, are hereby expressly incorporated-by-reference for the portions of the document discussed herein, as well as in their entirety.

### Definitions

[0009] Unless specific definitions are provided, the nomenclature used in connection with, and the procedures and techniques of, analytical chemistry, synthetic organic chemistry, and medicinal and pharmaceutical chemistry described herein are those well-known and commonly used in the art. Where permitted, all patents, applications, published applications and other publications and other data referred to throughout in the disclosure are incorporated by reference herein in their entirety.

[0010] Unless otherwise indicated, the following terms have the following meanings:

[0011] As used herein, “2′-deoxynucleoside” means a nucleoside comprising a 2′-H(H) deoxyfuranosyl sugar moiety. In certain embodiments, a 2′-deoxynucleoside is a 2′-β-D-deoxynucleoside and comprises a 2′-β-D-deoxyribosyl sugar moiety, which has the β-D ribosyl configuration as found in naturally occurring deoxyribonucleic acid (DNA). In certain embodiments, a 2′-deoxynucleoside may comprise a modified nucleobase or may comprise an RNA nucleobase (uracil).

[0012] As used herein, “2′-MOE” means a 2′-O(CH₂)₂OCH₃ group in place of the 2′-OH group of a furanosyl sugar moiety. A “2′-MOE sugar moiety” or a “2′-O-methoxyethyl sugar moiety” means a sugar moiety with a 2′-O(CH₂)₂OCH₃ group in place of the 2′-OH group of a furanosyl sugar moiety. Unless otherwise indicated, a 2′-MOE sugar moiety is in the β-D-ribosyl configuration. “MOE” means O-methoxyethyl.

[0013] As used herein, “2′-MOE nucleoside” means a nucleoside comprising a 2′-MOE sugar moiety.

[0014] As used herein, “2′-OMe” means a 2′-OCH₃ group in place of the 2′-OH group of a furanosyl sugar moiety. A “2′-O-methyl sugar moiety” or “2′-OMe sugar moiety” means a sugar moiety with a 2′-OCH₃ group in place of the 2′-OH group of a furanosyl sugar moiety. Unless otherwise indicated, a 2′-OMe sugar moiety is in the β-D-ribosyl configuration.

[0015] As used herein, “2′-OMe nucleoside” means a nucleoside comprising a 2′-OMe sugar moiety.

[0016] As used herein, “2′-F” means a 2′-fluoro group in place of the 2′-OH group of a furanosyl sugar moiety. A “2′-F sugar moiety” means a sugar moiety with a 2′-F group in place of the 2′-OH group of a furanosyl sugar moiety. Unless otherwise indicated, a 2′-F sugar moiety is in the β-D ribosyl stereochemical configuration.

[0017] As used herein, “2′-F nucleoside” means a nucleoside comprising a 2′-F sugar moiety.

[0018] As used herein “2′-NMA” means a 2′-OCH₂C(═O)—N(H)CH₃ group in place of the 2′-OH group of a furanosyl sugar moiety. A “2-NMA sugar moiety” or “2′-O-[2-(methylamino)-2-oxoethyl]sugar moiety” means a sugar moiety with a 2′-OCH₂C(═O)—N(H)CH₃ group in place of the 2′-OH group of a furanosyl sugar moiety.

[0019] “2′-NMA sugar moiety” means the sugar moiety of a 2′-NMA nucleoside.

[0020] As used herein, “2′-substituted nucleoside” means a nucleoside comprising a 2′-substituted furanosyl sugar moiety. As used herein, “2′-substituted” in reference to a sugar moiety means a sugar moiety comprising at least one 2′-substituent group other than H or OH.

[0021] As used herein, “3′ target site” refers to the 3′-most nucleotide of a target nucleic acid which is complementary to an antisense oligonucleotide, when the antisense oligonucleotide is hybridized to the target nucleic acid.

[0022] As used herein, “5′ target site” refers to the 5′-most nucleotide of a target nucleic acid which is complementary to an antisense oligonucleotide, when the antisense oligonucleotide is hybridized to the target nucleic acid.

[0023] As used herein, “5-methylcytosine” means a cytosine modified with a methyl group attached to the 5 position. A 5-methylcytosine is a modified nucleobase.

[0024] As used herein, “abasic sugar moiety” means a sugar moiety of a nucleoside that is not attached to a nucleobase. Such abasic sugar moieties are sometimes referred to in the art as “abasic nucleosides.”

[0025] As used herein, “ameliorate” in reference to a treatment means improvement in at least one symptom or hallmark relative to the same symptom or hallmark in the absence of the treatment. In certain embodiments, amelioration is the reduction in the severity or frequency of a symptom or hallmark or the delayed onset or slowing of progression in the severity or frequency of a symptom or hallmark. In certain embodiments, the symptom or hallmark is one or more of seizures, difficulty feeding, dystonia, spasticity, delayed motor development, delayed language development, delayed social skill development, white matter abnormalities, T cell infiltration, B cell infiltration, striatal necrosis, brain atrophy, basal ganglia calcification, and microencephaly. In certain embodiments, the hallmark is the level of IFNa or lymphocytosis in cerebrospinal fluid in the subject.

[0026] As used herein, “bicyclic sugar” or “bicyclic sugar moiety” means a modified sugar moiety comprising two rings, wherein the second ring is formed via a bridge connecting two of the atoms in the first ring thereby forming a bicyclic structure. In certain embodiments, the first ring of the bicyclic sugar moiety is a furanosyl moiety. In certain embodiments, the bicyclic sugar moiety does not comprise a furanosyl moiety. Examples of bicyclic sugar moieties include LNA (locked nucleic acid) sugar moiety and cEt sugar moiety as defined herein. A “bicyclic nucleoside” is a nucleoside comprising a bicyclic sugar moiety.

[0027] As used herein, “chirally enriched” in reference to a population means a plurality of molecules of identical molecular formula, wherein the number or percentage of molecules within the population that contain a particular stereochemical configuration at a particular chiral center is greater than the number or percentage of molecules expected to contain the same particular stereochemical configuration at the same particular chiral center within the population if the particular chiral center were stereorandom as defined herein. Chirally enriched populations of molecules having multiple chiral centers within each molecule may contain one or more stereorandom chiral centers. In certain embodiments, the molecules are modified oligonucleotides. In certain embodiments, the molecules are oligomeric compounds comprising modified oligonucleotides. In certain embodiments, the chiral center is at the phosphorous atom of a phosphorothioate internucleoside linkage. In certain embodiments, the chiral center is at the phosphorous atom of a mesyl phosphoramidate internucleoside linkage.

[0028] As used herein, “cerebrospinal fluid” or “CSF” means the fluid filling the space around the brain and spinal cord. “Artificial cerebrospinal fluid” or “aCSF” means a prepared or manufactured fluid that has certain properties (e.g., osmolarity, pH, and/or electrolytes) similar to cerebrospinal fluid and is biocompatible with CSF.

[0029] As used herein, “cleavable moiety” means a bond or group of atoms that is cleaved under physiological conditions, for example, inside a cell, an animal, or a human.

[0030] As used herein, “complementary” in reference to an oligonucleotide means that at least 70% of the nucleobases of the oligonucleotide and the nucleobases of another nucleic acid or one or more regions thereof are capable of hydrogen bonding with one another when the nucleobase sequence of the oligonucleotide and the other nucleic acid are aligned in opposing directions. “Complementary region” in reference to a region of an oligonucleotide means that at least 70% of the nucleobases of that region and the nucleobases of another nucleic acid or one or more regions thereof are capable of hydrogen bonding with one another when the nucleobase sequence of the oligonucleotide and the other nucleic acid are aligned in opposing directions. Complementary nucleobases mean nucleobases that are capable of forming hydrogen bonds with one another. Complementary nucleobase pairs include adenine (A) and thymine (T), adenine (A) and uracil (U), cytosine (C) and guanine (G), 5-methyl cytosine (mC) and guanine (G). Certain modified nucleobases that pair with natural nucleobases or with other modified nucleobases are known in the art and are not considered complementary nucleobases as defined herein unless indicated otherwise. For example, inosine can pair, but is not considered complementary, with adenosine, cytosine, or uracil. Complementary oligonucleotides and/or nucleic acids need not have nucleobase complementarity at each nucleoside. Rather, some mismatches are tolerated. As used herein, “fully complementary” or “100% complementary” in reference to oligonucleotides means that oligonucleotides are complementary to another oligonucleotide or nucleic acid at each nucleoside of the oligonucleotide.

[0031] As used herein, “conjugate group” means a group of atoms that is directly attached to an oligonucleotide. Conjugate groups include a conjugate moiety and a conjugate linker that attaches the conjugate moiety to the oligonucleotide.

[0032] As used herein, “conjugate linker” means a single bond or a group of atoms comprising at least one bond that connects a conjugate moiety to an oligonucleotide.

[0033] As used herein, “conjugate moiety” means a covalently bound group of atoms that modifies one or more properties of a molecule compared to the identical molecule lacking the conjugate moiety, including but not limited to pharmacodynamics, pharmacokinetics, stability, binding, absorption, tissue distribution, cellular distribution, cellular uptake, charge, and clearance.

[0034] As used herein, “constrained ethyl” or “cEt” or “cEt modified sugar moiety” means a f-D ribosyl bicyclic sugar moiety wherein the second ring of the bicyclic sugar is formed via a bridge connecting the 4′-carbon and the 2′-carbon of the β-D ribosyl sugar moiety, wherein the bridge has the formula 4′-CH(CH₃)—O-2′, and wherein the methyl group of the bridge is in the S configuration.

[0035] As used herein, “cEt nucleoside” means a nucleoside comprising a cEt modified sugar moiety.

[0036] As used herein, “deoxy region” means a region of 5-12 contiguous nucleotides, wherein at least 70% of the nucleosides comprise a β-D-2′-deoxyribosyl sugar moiety. In certain embodiments, a deoxy region is the gap of a gapmer.

[0037] As used herein, “hotspot region” is a range of nucleobases on a target nucleic acid that is amenable to reduction of the amount or activity of the target nucleic acid by the action of an oligomeric agent, oligomeric compound, antisense compound, or antisense agent.

[0038] As used herein, “internucleoside linkage” is the covalent linkage between adjacent nucleosides in an oligonucleotide. As used herein “modified internucleoside linkage” means any internucleoside linkage other than a phosphodiester internucleoside linkage.

[0039] As used herein, “linked nucleosides” are nucleosides that are connected in a contiguous sequence (i.e., no additional nucleosides are presented between those that are linked).

[0040] As used herein, “linker-nucleoside” means a nucleoside that links, either directly or indirectly, an oligonucleotide to a conjugate moiety. Linker-nucleosides are located within the conjugate linker of an oligomeric compound. Linker-nucleosides are not considered part of the oligonucleotide portion of an oligomeric compound even if they are contiguous with the oligonucleotide.

[0041] As used herein, “mismatch” or “non-complementary” means a nucleobase of a first nucleic acid sequence that is not complementary with the corresponding nucleobase of a second nucleic acid sequence or target nucleic acid when the first and second nucleic acid sequences are aligned.

[0042] As used herein, “motif” means the pattern of unmodified and/or modified sugar moieties, nucleobases, and/or internucleoside linkages, in an oligonucleotide.

[0043] As used herein, “modified nucleoside” means a nucleoside comprising a modified nucleobase and/or a modified sugar moiety.

[0044] As used herein, “non-bicyclic modified sugar moiety” means a modified sugar moiety that comprises a modification, such as a substituent, that does not form a bridge between two atoms of the sugar to form a second ring.

[0045] As used herein, “nucleobase” means an unmodified nucleobase or a modified nucleobase. A nucleobase is a heterocyclic moiety. As used herein an “unmodified nucleobase” is adenine (A), thymine (T), cytosine (C), uracil (U), or guanine (G). As used herein, a “modified nucleobase” is a group of atoms other than unmodified A, T, C, U, or G capable of pairing with at least one other nucleobase. A “5-methyl cytosine” is a modified nucleobase. A universal base is a modified nucleobase that can pair with any one of the five unmodified nucleobases.

[0046] As used herein, “nucleobase sequence” means the order of contiguous nucleobases in a nucleic acid or oligonucleotide independent of any sugar or internucleoside linkage modification.

[0047] As used herein, “nucleoside” means a compound or fragment of a compound comprising a nucleobase and a sugar moiety. The nucleobase and sugar moiety are each, independently, unmodified or modified.

[0048] As used herein, “oligomeric agent” means an oligomeric compound and optionally one or more additional features, such as a second oligomeric compound. An oligomeric agent may be a single-stranded oligomeric compound or may be an oligomeric duplex formed by two complementary oligomeric compounds.

[0049] As used herein, “oligomeric compound” means an oligonucleotide and optionally one or more additional features, such as a conjugate group or terminal group. An oligomeric compound may be paired with a second oligomeric compound that is complementary to the first oligomeric compound or may be unpaired. A “singled-stranded oligomeric compound” is an unpaired oligomeric compound.

[0050] The term “oligomeric duplex” means a duplex formed by two oligomeric compounds having complementary nucleobase sequences.

[0051] As used herein, “oligonucleotide” means a strand of linked nucleosides connected via internucleoside linkages, wherein each nucleoside and internucleoside linkage may be modified or unmodified. Unless otherwise indicated, oligonucleotides consist of 8-50 linked nucleosides. As used herein, “modified oligonucleotide” means an oligonucleotide, wherein at least one nucleoside or internucleoside linkage is modified. As used herein, “unmodified oligonucleotide” means an oligonucleotide that does not comprise any nucleoside modifications or internucleoside modifications.

[0052] As used herein, “pharmaceutically acceptable carrier or diluent” means any substance suitable for use in administering to an animal. Certain such carriers enable pharmaceutical compositions to be formulated as, for example, tablets, pills, dragees, capsules, liquids, gels, syrups, slurries, suspensions, and lozenges for the oral ingestion by a subject. In certain embodiments, a pharmaceutically acceptable carrier or diluent is sterile water, sterile saline, sterile buffer solution or sterile artificial cerebrospinal fluid.

[0053] As used herein “pharmaceutically acceptable salts” means physiologically and pharmaceutically acceptable salts of compounds. Pharmaceutically acceptable salts retain the desired biological activity of the parent compound and do not impart undesired toxicological effects thereto.

[0054] As used herein “pharmaceutical composition” means a mixture of substances suitable for administering to a subject. For example, a pharmaceutical composition may comprise an oligomeric compound and a sterile aqueous solution. In certain embodiments, a pharmaceutical composition shows activity in free uptake assay in certain cell lines.

[0055] As used herein “prodrug” means a therapeutic agent in a first form outside the body that is converted to a second form within an animal or cells thereof. Typically, conversion of a prodrug within the animal is facilitated by the action of an enzymes (e.g., endogenous or viral enzyme) or chemicals present in cells or tissues and/or by physiologic conditions. In certain embodiments, the first form of the prodrug is less active than the second form.

[0056] As used herein, “stabilized phosphate group” refers to a 5′-chemical moiety that results in stabilization of a 5′-phosphate moiety of the 5′-terminal nucleoside of an oligonucleotide, relative to the stability of an unmodified 5′-phosphate of an unmodified nucleoside under biologic conditions. Such stabilization of a 5′-phophate group includes but is not limited to resistance to removal by phosphatases. Stabilized phosphate groups include, but are not limited to, 5′-vinyl phosphonates and 5′-cyclopropyl phosphonate.

[0057] As used herein, “standard cell assay” means the assays described in Examples 1 and 2 and reasonable variations thereof.

[0058] As used herein, “stereorandom” or “stereorandom chiral center” in the context of a population of molecules of identical molecular formula means a chiral center that is not controlled during synthesis, or enriched following synthesis, for a particular absolute stereochemical configuration. The stereochemical configuration of a chiral center is considered random when it is the result of a synthetic method that is not designed to control the stereochemical configuration. For example, in a population of molecules comprising a stereorandom chiral center, the number of molecules having the (S) configuration of the stereorandom chiral center may be but is not necessarily the same as the number of molecules having the (R) configuration of the stereorandom chiral center (“racemic”). In certain embodiments, the stereorandom chiral center is not racemic because one absolute configuration predominates following synthesis, e.g., due to the action of non-chiral reagents near the enriched stereochemistry of an adjacent sugar moiety. In certain embodiments, a stereorandom chiral center is at the phosphorous atom of a stereorandom phosphorothioate or mesyl phosphoroamidate internucleoside linkage.

[0059] As used herein, “sugar moiety” means an unmodified sugar moiety or a modified sugar moiety. As used herein, “unmodified sugar moiety” means a 2′-OH(H) ribosyl moiety, as found in RNA (an “unmodified RNA sugar moiety”), or a 2′-H(H) deoxyribosyl sugar moiety, as found in DNA (an “unmodified DNA sugar moiety”). Unmodified sugar moieties have one hydrogen at each of the 1′, 3′, and 4′ positions, an oxygen at the 3′ position, and two hydrogens at the 5′ position. As used herein, “modified sugar moiety” or “modified sugar” means a modified furanosyl sugar moiety or a sugar surrogate.

[0060] As used herein, “sugar surrogate” means a modified sugar moiety that can link a nucleobase to another group, such as an internucleoside linkage, conjugate group, or terminal group in an oligonucleotide, but which is not a furanosyl sugar moiety or a bicyclic sugar moiety. Modified nucleosides comprising sugar surrogates can be incorporated into one or more positions within an oligonucleotide and such oligonucleotides are capable of hybridizing to complementary oligomeric compounds or target nucleic acids. Examples of sugar surrogates include GNA (glycol nucleic acid), FHNA (fluoro hexitol nucleic acid), morpholino, and other structures described herein and known in the art.

[0061] As used herein, “symptom or hallmark” means any physical feature or test result that indicates the existence or extent of a disease or disorder. In certain embodiments, a symptom is apparent to a subject or to a medical professional examining or testing said subject. In certain embodiments, a hallmark is apparent upon invasive diagnostic testing, including, but not limited to, post-mortem tests. In certain embodiments, a hallmark is apparent on a brain MRI scan.

[0062] As used herein, “target nucleic acid” and “target RNA” mean a nucleic acid that an oligomeric compound is designed to affect. Target RNA means an RNA transcript and includes pre-mRNA and mature mRNA unless otherwise specified.

[0063] As used herein, “target region” means a portion of a target nucleic acid to which an oligomeric compound is designed to hybridize.

[0064] As used herein, “terminal group” means a chemical group or group of atoms that is covalently linked to a terminus of an oligonucleotide.

[0065] As used herein, “antisense activity” means any detectable and/or measurable change attributable to the hybridization of an antisense compound to its target nucleic acid. In certain embodiments, antisense activity is a decrease in the amount or expression of a target nucleic acid or protein encoded by such target nucleic acid compared to target nucleic acid levels or target protein levels in the absence of the antisense compound. In certain embodiments, antisense activity is the modulation of splicing of a target pre-mRNA.

[0066] As used herein, “antisense agent” means an antisense compound and optionally one or more additional features, such as a sense compound.

[0067] As used herein, “antisense compound” means an antisense oligonucleotide and optionally one or more additional features, such as a conjugate group.

[0068] As used herein, “sense compound” means a sense oligonucleotide and optionally one or more additional features, such as a conjugate group.

[0069] As used herein, “antisense oligonucleotide” means an oligonucleotide, including the oligonucleotide portion of an antisense compound, that is capable of hybridizing to a target nucleic acid and is capable of at least one antisense activity. Antisense oligonucleotides include but are not limited to antisense RNAi oligonucleotides and antisense RNase H oligonucleotides.

[0070] As used herein, “sense oligonucleotide” means an oligonucleotide, including the oligonucleotide portion of a sense compound, that is capable of hybridizing to an antisense oligonucleotide.

[0071] As used herein, “gapmer” means a modified oligonucleotide comprising an internal region positioned between external regions having one or more nucleosides, wherein the nucleosides comprising the internal region are chemically distinct from the nucleoside or nucleosides comprising the external regions, and wherein the modified oligonucleotide supports RNAse H cleavage. The internal region may be referred to as the “gap” and the external regions may be referred to as the “wings.” In certain embodiments, the internal region is a deoxy region. The positions of the internal region or gap refer to the order of the nucleosides of the internal region and are counted starting from the 5′-end of the internal region. Unless otherwise indicated, “gapmer” refers to a sugar motif. In certain embodiments, the internal region is a deoxy region. In certain embodiments, each nucleoside of the gap is a 2′-β-D-deoxynucleoside. In certain embodiments, the gap comprises one 2′-substituted nucleoside at position 1, 2, 3, 4, or 5 of the gap, and the remainder of the nucleosides of the gap are 2′-β-D-deoxynucleosides. As used herein, the term “MOE gapmer” indicates a gapmer having a gap comprising 2′-β-D-deoxynucleosides and wings comprising 2′-MOE nucleosides. As used herein, the term “mixed wing gapmer” indicates a gapmer having wings comprising modified nucleosides comprising at least two different sugar modifications. Unless otherwise indicated, a gapmer may comprise one or more modified internucleoside linkages and/or modified nucleobases and such modifications do not necessarily follow the gapmer pattern of the sugar modifications.

[0072] As used herein, “cell-targeting moiety” means a conjugate group or portion of a conjugate group that is capable of binding to a particular cell type or particular cell types.

[0073] As used herein, “hybridization” means the annealing of oligonucleotides and/or nucleic acids. While not limited to a particular mechanism, the most common mechanism of hybridization involves hydrogen bonding, which may be Watson-Crick, Hoogsteen or reversed Hoogsteen hydrogen bonding, between complementary nucleobases. In certain embodiments, complementary nucleic acid molecules include, but are not limited to, an antisense compound and a nucleic acid target. In certain embodiments, complementary nucleic acid molecules include, but are not limited to, an oligonucleotide and a nucleic acid target.

[0074] As used herein, “RNAi agent” means an antisense agent that acts, at least in part, through RISC or Ago2 to modulate a target nucleic acid and/or protein encoded by a target nucleic acid. RNAi agents include, but are not limited to double-stranded siRNA, single-stranded RNAi (ssRNAi), and microRNA, including microRNA mimics. RNAi agents may comprise conjugate groups and/or terminal groups. In certain embodiments, an RNAi agent modulates the amount and/or activity, of a target nucleic acid. The term RNAi agent excludes antisense agents that act through RNase H.

[0075] As used herein, “RNase H agent” means an antisense agent that acts through RNase H to modulate a target nucleic acid and/or protein encoded by a target nucleic acid. In certain embodiments, RNase H agents are single-stranded. In certain embodiments, RNase H agents are double-stranded. RNase H compounds may comprise conjugate groups and/or terminal groups. In certain embodiments, an RNase H agent modulates the amount and/or activity of a target nucleic acid. The term RNase H agent excludes antisense agents that act principally through RISC/Ago2.

[0076] As used herein, “treating” means improving a subject's disease or condition by administering an oligomeric agent or oligomeric compound described herein. In certain embodiments, treating a subject improves a symptom relative to the same symptom in the absence of the treatment. In certain embodiments, treatment reduces in the severity or frequency of a symptom, or delays the onset of a symptom, slows the progression of a symptom, or slows the severity or frequency of a symptom.

[0077] As used herein, “therapeutically effective amount” means an amount of a pharmaceutical agent or composition that provides a therapeutic benefit to an animal. For example, a therapeutically effective amount improves a symptom of a disease.

### CERTAIN EMBODIMENTS

[0078] Embodiment 1. An oligomeric compound comprising a modified oligonucleotide consisting of 8 to 80 linked nucleosides, wherein the nucleobase sequence of the modified oligonucleotide is at least 80% complementary to an equal length portion of an IFNAR1 nucleic acid, and wherein the modified oligonucleotide has at least one modification selected from a modified sugar moiety and a modified internucleoside linkage.

[0079] Embodiment 2. The oligomeric compound of embodiment 1, wherein the IFNAR1 nucleic acid has the nucleobase sequence of any of SEQ ID NO: 1 or SEQ ID NO: 2.

[0080] Embodiment 3. The oligomeric compound of embodiment 1 or embodiment 2, wherein the nucleobase sequence of the modified oligonucleotide is at least 80% complementary to an equal length portion within nucleobases 5085-5133, 19997-20061, 20076-20133, 20528-20616, 22294-22329, 22453-22476, 22595-22626, 25530-25565, 25606-25652, 25710-25767, 25768-25827, 28421-28468, 29924-29949, 29968-30021, 31072-31096, 31792-31837, 32353-32386, or 35016-35042 of SEQ ID NO: 1.

[0081] Embodiment 4. The oligomeric compound of any of embodiments 1-3, wherein the nucleobase sequence of the modified oligonucleotide is at least 80% complementary to an equal length portion within nucleobases 20003-20022, 20104-20123, 20591-20610, 22455-22474, 22456-22475, or 29981-30000 of SEQ ID NO: 1.

[0082] Embodiment 5. The oligomeric compound of any of embodiments 1-4, wherein the nucleobase sequence of the modified oligonucleotide is at least 85%, at least 90%, at least 95%, or 100% complementary to an equal length portion of the IFNAR1 nucleic acid.

[0083] Embodiment 6. An oligomeric compound comprising a modified oligonucleotide consisting of 8 to 80 linked nucleosides, wherein the nucleobase sequence of the modified oligonucleotide comprises at least 8, at least 9, at least 10, at least 11, at least 12, at least 13, at least 14, at least 15, or at least 16 contiguous nucleobases of any of the nucleobase sequences of SEQ ID NOs: 12-2687, and wherein the modified oligonucleotide has at least one modification selected from a modified sugar moiety and a modified internucleoside linkage.

[0084] Embodiment 7. The oligomeric compound of embodiment 6, wherein the nucleobase sequence of the modified oligonucleotide comprises the nucleobase sequence of any of SEQ ID NOs: 12-2687.

[0085] Embodiment 8. The oligomeric compound of embodiment 7, wherein the modified oligonucleotide has a nucleobase sequence consisting of the nucleobase sequence of any of SEQ ID NOs: 12-2687.

[0086] Embodiment 9. The oligomeric compound of any of embodiments 6-8, wherein the modified oligonucleotide has a nucleobase sequence comprising at least 8, at least 9, at least 10, at least 11, at least 12, at least 13, at least 14, at least 15, or 16 contiguous nucleobases of any of the nucleobase sequences of SEQ ID NOs: 12-89.

[0087] Embodiment 10. The oligomeric compound of any of embodiments 6-8, wherein the modified oligonucleotide has a nucleobase sequence comprising at least 8, at least 9, at least 10, at least 11, at least 12, at least 13, at least 14, at least 15, at least 16, at least 17, at least 18, at least 19, or 20 contiguous nucleobases of any of the nucleobase sequences of SEQ ID NOs: 90-2687.

[0088] Embodiment 11. The oligomeric compound of any of embodiments 6-8, wherein the modified oligonucleotide has a nucleobase sequence comprising at least 8, at least 9, at least 10, at least 11, at least 12, at least 13, at least 14, at least 15, at least 16, at least 17, at least 18, at least 19, or 20 contiguous nucleobases of any of the nucleobase sequences of SEQ ID NOs: 1317, 2040, 2625, 2668, 2670, or 2679.

[0089] Embodiment 12. The oligomeric compound of embodiment 11, wherein the modified oligonucleotide consists of 20 to 80 linked nucleosides, wherein the nucleobase sequence of the modified oligonucleotide comprises the nucleobase sequence of any of SEQ ID NOs: 1317, 2040, 2625, 2668, 2670, or 2679.

[0090] Embodiment 13. The oligomeric compound of embodiment 12, wherein the modified oligonucleotide has a nucleobase sequence consisting of the nucleobase sequence of any one of SEQ ID NOs: 1317, 2040, 2625, 2668, 2670, or 2679.

[0091] Embodiment 14. The oligomeric compound of any of embodiments 6-12, wherein the nucleobase sequence of the modified oligonucleotide is at least 85%, at least 90%, at least 95%, or 100% complementary to an equal length portion of an IFNAR1 nucleic acid, wherein the IFNAR1 nucleic acid has the nucleobase sequence of SEQ ID NO: 1 or SEQ ID NO: 2.

[0092] Embodiment 15. The oligomeric compound of any of embodiments 1-14, wherein the modified oligonucleotide consists of 10 to 25, 10 to 30, 10 to 50, 12 to 20, 12 to 25, 12 to 30, 12 to 50, 13 to 20, 13 to 25, 13 to 30, 13 to 50, 14 to 20, 14 to 25, 14 to 30, 14 to 50, 15 to 20, 15 to 25, 15 to 30, 15 to 50, 16 to 18, 16 to 20, 16 to 25, 16 to 30, 16 to 50, 17 to 20, 17 to 25, 17 to 30, 17 to 50, 18 to 20, 18 to 22, 18 to 25, 18 to 30, 18 to 50, 19 to 20, 19 to 25, 19 to 30, 19 to 50, 20 to 25, 20 to 30, 20 to 50, 21 to 25, 21 to 30, 21 to 50, 22 to 25, 22 to 30, 22 to 50, 23 to 25, 23 to 30, or 23 to 50 linked nucleosides.

[0093] Embodiment 16. The oligomeric compound of any of embodiments 1-14, wherein the modified oligonucleotide consists of 20 linked nucleosides.

[0094] Embodiment 17. The oligomeric compound of any of embodiments 1-16, wherein at least one nucleoside of the modified oligonucleotide comprises a modified sugar moiety.

[0095] Embodiment 18. The oligomeric compound of embodiment 17, wherein the modified sugar moiety comprises a bicyclic sugar moiety.

[0096] Embodiment 19. The oligomeric compound of embodiment 18, wherein the bicyclic sugar moiety comprises a 2′-4′ bridge selected from —O—CH₂— and —O—CH(CH₃)—.

[0097] Embodiment 20. The oligomeric compound of embodiment 17, wherein the modified sugar moiety comprises a non-bicyclic modified sugar moiety.

[0098] Embodiment 21. The oligomeric compound of embodiment 20, wherein the non-bicyclic modified sugar moiety is a 2′-MOE sugar moiety or 2′-OMe sugar moiety.

[0099] Embodiment 22. The oligomeric compound of any of embodiments 1-21, wherein at least one nucleoside of the modified oligonucleotide compound comprises a sugar surrogate.

[0100] Embodiment 23. The oligomeric compound of any of embodiments 1-22, wherein the modified oligonucleotide comprises at least one modified internucleoside linkage.

[0101] Embodiment 24. The oligomeric compound of embodiment 23, wherein at least one modified internucleoside linkage is a phosphorothioate internucleoside linkage.

[0102] Embodiment 25. The oligomeric compound of embodiment 22 or embodiment 23, wherein each internucleoside linkage is a modified internucleoside linkage.

[0103] Embodiment 26. The oligomeric compound of embodiment 25, wherein each internucleoside linkage is a phosphorothioate internucleoside linkage.

[0104] Embodiment 27. The oligomeric compound of any of embodiments 22-25, wherein at least one internucleoside linkage of the modified oligonucleotide is a phosphodiester internucleoside linkage.

[0105] Embodiment 28. The oligomeric compound of any of embodiments 1-23, wherein each internucleoside linkage of the modified oligonucleotide is independently selected from a phosphodiester internucleoside linkage or a phosphorothioate internucleoside linkage.

[0106] Embodiment 29. The oligomeric compound of any of embodiments 1-26 or 28, wherein at least 10, at least 11, at least 12, at least 13, at least 14, at least 15, at least 16, at least 17, or at least 18 internucleoside linkages of the modified oligonucleotide are phosphorothioate internucleoside linkages.

[0107] Embodiment 30. The oligomeric compound of embodiment 23, wherein the modified oligonucleotide comprises an internucleoside linkage motif (5′ to 3′) selected from sssssssssssssss, soooossssssssssooss, sooosssssssssssooss, soosossssssssssooss, soossssssssssssooss, sosoossssssssssooss, sossossssssssssooss, sosssssssssssssooss, ssooossssssssssooss, sssoossssssssssooss, ssssossssssssssooss, sooooossssssssssoss, soooosssssssssssoss, sooosossssssssssoss, sooossssssssssssoss, soosoossssssssssoss, soossossssssssssoss, soosssssssssssssoss, sosooossssssssssoss, sossoossssssssssoss, sosssossssssssssoss, ssoooossssssssssoss, sssooossssssssssoss, and ssssoossssssssssoss, wherein each “s” represents a phosphorothioate internucleoside linkage and each “o” represents a phosphodiester internucleoside linkage.

[0108] Embodiment 31. The oligomeric compound of any of embodiments 1-30, wherein the modified oligonucleotide comprises at least one modified nucleobase.

[0109] Embodiment 32. The oligomeric compound of embodiment 31, wherein the modified nucleobase is 5-methyl cytosine.

[0110] Embodiment 33. The oligomeric compound of embodiment 32, wherein each cytosine is a 5-methyl cytosine.

[0111] Embodiment 34. The oligomeric compound of any of embodiments 1-33, wherein the modified oligonucleotide comprises a deoxy region.

[0112] Embodiment 35. The oligomeric compound of embodiment 34, wherein each nucleoside of the deoxy region is a 2′-β-D-deoxynucleoside.

[0113] Embodiment 36. The oligomeric compound of embodiment 34 or embodiment 35, wherein the deoxy region consists of 6, 7, 8, 9, 10, or 6-10 linked nucleosides.

[0114] Embodiment 37. The oligomeric compound of any of embodiments 34-36, wherein each nucleoside immediately adjacent to the deoxy region comprises a modified sugar moiety.

[0115] Embodiment 38. The oligomeric compound of any of embodiments 34-37, wherein the deoxy region is flanked on the 5′-side by a 5′-external region consisting of 1-6 linked 5′-external region nucleosides and on the 3′-side by a 3′-external region consisting of 1-6 linked 3′-external region nucleosides; wherein the 3′-most nucleoside of the 5′ external region comprises a modified sugar moiety; and the 5′-most nucleoside of the 3′ external region comprises a modified sugar moiety.

[0116] Embodiment 39. The oligomeric compound of embodiment 38, wherein each nucleoside of the 3′ external region comprises a modified sugar moiety.

[0117] Embodiment 40. The oligomeric compound of embodiment 38 or embodiment 39, wherein each nucleoside of the 5′ external region comprises a modified sugar moiety.

[0118] Embodiment 41. The oligomeric compound of embodiment 40, wherein the modified oligonucleotide has:
[0119] a 5′ external region consisting of 5 linked nucleosides;
[0120] a deoxy region consisting of 10 linked nucleosides; and
[0121] a 3′ external region consisting of 5 linked nucleosides;

[0122] wherein each of the 5′ external region nucleosides and each of the 3′ external region nucleosides is a 2′-MOE nucleoside.

[0123] Embodiment 42. The oligomeric compound of embodiment 40, wherein the modified oligonucleotide has:
[0124] a 5′ external region consisting of 6 linked nucleosides;
[0125] a deoxy region consisting of 10 linked nucleosides; and
[0126] a 3′ external region consisting of 4 linked nucleosides;

[0127] wherein each of the 5′ external region nucleosides and each of the 3′ external region nucleosides is a 2′-MOE nucleoside.

[0128] Embodiment 43. The oligomeric compound of embodiment 40, wherein the modified oligonucleotide has:
[0129] a 5′ external region consisting of 3 linked nucleosides;
[0130] a deoxy region consisting of 10 linked nucleosides; and
[0131] a 3′ external region consisting of 3 linked nucleosides;

[0132] wherein each of the 5′ external region nucleosides and each of the 3′ external region nucleosides is a cEt nucleoside.

[0133] Embodiment 44. The oligomeric compound of embodiment 40, wherein the modified oligonucleotide has:
[0134] a 5′ external region consisting of 1-6 linked nucleosides;
[0135] a deoxy region consisting of 6-10 linked nucleosides; and
[0136] a 3′ external region consisting of 1-6 linked nucleosides;

[0137] wherein each of the 5′ external region nucleosides and each of the 3′ external region nucleosides is a cEt nucleoside or a 2′-MOE nucleoside; and each of the deoxy region nucleosides is a 2′-β-D-deoxynucleoside.

[0138] Embodiment 45. The oligomeric compound of any of embodiments 38-39 or 41-44, wherein the modified oligonucleotide has a sugar motif comprising:
[0139] a 5′ external region consisting of 3-6 linked nucleosides;
[0140] a deoxy region consisting of 7-8 linked nucleosides; and
[0141] a 3′ external region consisting of 3-6 linked nucleosides;
[0142] wherein each of the 3′ external region nucleosides is selected from a 2′-MOE nucleoside and a cEt nucleoside, and the 5′ external region has the following formula:

(Nk)n(Nd)(Nx)
[0143] wherein each Nk is a bicyclic nucleoside, Nx 2′-OMe nucleoside and Nd is a 2′-β-D-deoxynucleoside; and n is from 1-4.

[0144] Embodiment 46. An oligomeric compound of any of embodiments 1-38, wherein the modified oligonucleotide has a sugar motif (5′ to 3′) selected from eeeeeddddddddddeeeee, eeeeeeddddddddddeeee, and kkkddddddddddkkk, wherein each “d” represents a 2′-β-D-deoxyribosyl sugar moiety, each “e” represents a 2′-MOE sugar moiety, and each “k” represents a cEt modified sugar moiety.

[0145] Embodiment 47. An oligomeric compound comprising a modified oligonucleotide according to the following chemical notation: ^{m}CₑₛTₑₒTₑₒTₑₒTₑₒTₑₒ^{m}C_{ds}T_{ds}G_{ds}^{m}C_{ds}T_{ds}^{m}C_{ds}T_{ds}T_{ds}A_{ds}T_{ds}Aₑₒ^{m}CₑₛGₑₛ^{m}Cₑ (SEQ ID NO 2668), wherein:
[0146] A=an adenine nucleobase,
[0147] ^{m}C=a 5-methyl cytosine nucleobase,
[0148] G=a guanine nucleobase,
[0149] T=a thymine nucleobase,
[0150] e=a 2′-MOE sugar moiety,
[0151] d=a 2′-β-D-deoxyribosyl sugar moiety,
[0152] s=a phosphorothioate internucleoside linkage, and
[0153] o=a phosphodiester internucleoside linkage.

[0154] Embodiment 48. An oligomeric compound comprising a modified oligonucleotide according to the following chemical notation: ^{m}CₑₛTₑₒGₑₒTₑₒTₑₒTₑₒT_{ds}A_{ds}^{m}C_{ds}A_{ds}T_{ds}T_{ds}T_{ds}T_{ds}T_{ds}T_{ds}TₑₒTₑₛ^{m}Cₑₛ^{m}Cₑ (SEQ ID NO 2040), wherein:
[0155] A=an adenine nucleobase,
[0156] ^{m}C=a 5-methyl cytosine nucleobase,
[0157] G=a guanine nucleobase,
[0158] T=a thymine nucleobase,
[0159] e=a 2′-MOE sugar moiety,
[0160] d=a 2′-β-D-deoxyribosyl sugar moiety,
[0161] s=a phosphorothioate internucleoside linkage, and
[0162] o=a phosphodiester internucleoside linkage.

[0163] Embodiment 49. An oligomeric compound comprising a modified oligonucleotide according to the following chemical notation: TₑₛTₑₒTₑₒAₑₒTₑₛ^{m}C_{ds}^{m}C_{ds}A_{ds}A_{ds}T_{ds}T_{ds}A_{ds}T_{ds}^{m}C_{ds}^{m}C_{ds}AₑₒTₑₒ^{m}Cₑₛ^{m}Cₑₛ^{m}Cₑ (SEQ ID NO 2670), wherein:
[0164] A=an adenine nucleobase,
[0165] ^{m}C=a 5-methyl cytosine nucleobase,
[0166] G=a guanine nucleobase,
[0167] T=a thymine nucleobase,
[0168] e=a 2′-MOE sugar moiety,
[0169] d=a 2′-β-D-deoxyribosyl sugar moiety,
[0170] s=a phosphorothioate internucleoside linkage, and
[0171] o=a phosphodiester internucleoside linkage.

[0172] Embodiment 50. An oligomeric compound comprising a modified oligonucleotide according to the following chemical notation: Tₑₛ^{m}CₑₒGₑₒ^{m}Cₑₒ^{m}CₑₛT_{ds}A_{ds}A_{ds}T_{ds}T_{ds}T_{ds}T_{ds}T_{ds}^{m}C_{ds}T_{ds}^{m}CₑₒTₑₒ^{m}CₑₛAₑₛ^{m}Cₑ (SEQ ID NO 2679), wherein:
[0173] A=an adenine nucleobase,
[0174] ^{m}C=a 5-methyl cytosine nucleobase,
[0175] G=a guanine nucleobase,
[0176] T=a thymine nucleobase,
[0177] e=a 2′-MOE sugar moiety,
[0178] d=a 2′-β-D-deoxyribosyl sugar moiety,
[0179] s=a phosphorothioate internucleoside linkage, and
[0180] o=a phosphodiester internucleoside linkage.

[0181] Embodiment 51. An oligomeric compound comprising a modified oligonucleotide according to the following chemical notation: TₑₛTₑₒTₑₒ^{m}CₑₒAₑₒTₑₒA_{ds}T_{ds}T_{ds}T_{ds}G_{ds}T_{ds}T_{ds}A_{ds}^{m}C_{ds}T_{ds}Tₑₒ^{m}Cₑₛ^{m}CₑₛTₑ (SEQ ID NO 2625), wherein:
[0182] A=an adenine nucleobase,
[0183] ^{m}C=a 5-methyl cytosine nucleobase,
[0184] G=a guanine nucleobase,
[0185] T=a thymine nucleobase,
[0186] e=a 2′-MOE sugar moiety,
[0187] d=a 2′-β-D-deoxyribosyl sugar moiety,
[0188] s=a phosphorothioate internucleoside linkage, and
[0189] o=a phosphodiester internucleoside linkage.

[0190] Embodiment 52. An oligomeric compound comprising a modified oligonucleotide according to the following chemical notation: TₑₛTₑₒ^{m}CₑₒGₑₒ^{m}Cₑₒ^{m}CₑₒT_{ds}A_{ds}A_{ds}T_{ds}T_{ds}T_{ds}T_{ds}T_{ds}^{m}C_{ds}T_{ds}^{m}CₑₒTₑₛ^{m}CₑₛAₑ (SEQ ID NO 1317), wherein:
[0191] A=an adenine nucleobase,
[0192] ^{m}C=a 5-methyl cytosine nucleobase,
[0193] G=a guanine nucleobase,
[0194] T=a thymine nucleobase,
[0195] e=a 2′-MOE sugar moiety,
[0196] d=a 2′-β-D-deoxyribosyl sugar moiety,
[0197] s=a phosphorothioate internucleoside linkage, and
[0198] o=a phosphodiester internucleoside linkage.

[0199] Embodiment 53. The oligomeric compound of any of embodiments 1-52, consisting of the modified oligonucleotide.

[0200] Embodiment 54. The oligomeric compound of any of embodiments 1-52, wherein the oligomeric compound comprises a conjugate group.

[0201] Embodiment 55. The oligomeric compound of embodiment 54, wherein the conjugate group comprises a conjugate linker and a conjugate moiety.

[0202] Embodiment 56. The oligomeric compound of embodiment 54 or embodiment 55, wherein the conjugate linker consists of a single bond.

[0203] Embodiment 57. The oligomeric compound of any of embodiments 55 or 56, wherein the conjugate linker is cleavable.

[0204] Embodiment 58. The oligomeric compound of any of embodiments 55-57, wherein the conjugate linker comprises 1-3 linker-nucleosides.

[0205] Embodiment 59. The oligomeric compound of any of embodiments 55-57, wherein the conjugate linker does not comprise any linker nucleosides.

[0206] Embodiment 60. The oligomeric compound of any of embodiments 54-59, wherein the conjugate group is attached to the modified oligonucleotide at the 5′-end of the modified oligonucleotide.

[0207] Embodiment 61. The oligomeric compound of any of embodiments 54-59, wherein the conjugate group is attached to the modified oligonucleotide at the 3′-end of the modified oligonucleotide.

[0208] Embodiment 62. The oligomeric compound of any of embodiments 1 to 61, wherein the oligomeric compound comprises a terminal group.

[0209] Embodiment 63. The oligomeric compound of embodiment 62 wherein the terminal group is an abasic sugar moiety.

[0210] Embodiment 64. The oligomeric compound of any one of embodiments 1-62 wherein the oligomeric compound is a singled-stranded oligomeric compound.

[0211] Embodiment 65. A modified oligonucleotide according to the following chemical structure:

[chemical structure]

[0212] Embodiment 66. The modified oligonucleotide of embodiment 65, which is the sodium salt or the potassium salt.

[0213] Embodiment 67. A modified oligonucleotide according to the following chemical structure:

[chemical structure]

[0214] Embodiment 68. A modified oligonucleotide according to the following chemical structure:

[chemical structure]

[0215] Embodiment 69. The modified oligonucleotide of embodiment 68, which is the sodium salt or the potassium salt.

[0216] Embodiment 70. A modified oligonucleotide according to the following chemical structure:

[chemical structure]

[0217] Embodiment 71. A modified oligonucleotide according to the following chemical structure:

[chemical structure]

[0218] Embodiment 72. The modified oligonucleotide of embodiment 71, which is the sodium salt or the potassium salt.

[0219] Embodiment 73. A modified oligonucleotide according to the following chemical structure:

[chemical structure]

[0220] Embodiment 74. A modified oligonucleotide according to the following chemical structure:

[chemical structure]

[0221] Embodiment 75. The modified oligonucleotide of embodiment 74, which is the sodium salt or the potassium salt.

[0222] Embodiment 76. A modified oligonucleotide according to the following chemical structure:

[chemical structure]

[0223] Embodiment 77. A modified oligonucleotide according to the following chemical structure:

[chemical structure]

[0224] Embodiment 78. The modified oligonucleotide of embodiment 77, which is the sodium salt or the potassium salt.

[0225] Embodiment 79. A modified oligonucleotide according to the following chemical structure:

[chemical structure]

[0226] Embodiment 80. A modified oligonucleotide according to the following chemical structure:

[chemical structure]

[0227] Embodiment 81. The modified oligonucleotide of embodiment 80, which is the sodium salt or the potassium salt.

[0228] Embodiment 82. A modified oligonucleotide according to the following chemical structure:

[chemical structure]

[0229] Embodiment 83. A chirally enriched population of oligomeric compounds of any of embodiments 1-64 or a chirally enriched population of modified oligonucleotides of any of embodiments 65-82, wherein the population is enriched for modified oligonucleotides comprising at least one particular phosphorothioate internucleoside linkage having a particular stereochemical configuration.

[0230] Embodiment 84. The chirally enriched population of embodiment 83, wherein the population is enriched for modified oligonucleotides comprising at least one particular phosphorothioate internucleoside linkage having the (Sp) or (Rp) configuration.

[0231] Embodiment 85. The chirally enriched population of embodiment 83, wherein the population is enriched for modified oligonucleotides having a particular, independently selected stereochemical configuration at each phosphorothioate internucleoside linkage.

[0232] Embodiment 86. The chirally enriched population of embodiment 83, wherein the population is enriched for modified oligonucleotides having the (Rp) configuration at one particular phosphorothioate internucleoside linkage and the (Sp) configuration at each of the remaining phosphorothioate internucleoside linkages.

[0233] Embodiment 87. The chirally enriched population of embodiment 83, wherein the population is enriched for modified oligonucleotides having at least 3 contiguous phosphorothioate internucleoside linkages in the Sp, Sp, and Rp configurations, in the 5′ to 3′ direction.

[0234] Embodiment 88. A population of oligomeric compounds of any of embodiments 1-64, or a population of modified oligonucleotides of any of embodiments 65-82, wherein all of the phosphorothioate internucleoside linkages of the modified oligonucleotide are stereorandom.

[0235] Embodiment 89. An oligomeric duplex, comprising a first oligomeric compound comprising a first modified oligonucleotide and a second oligomeric compound comprising a second modified oligonucleotide, wherein the first oligomeric compound is an oligomeric compound of any of embodiments 1-64.

[0236] Embodiment 90. The oligomeric duplex of embodiment 89, wherein the second modified oligonucleotide consists of 8 to 80 linked nucleosides, and wherein the nucleobase sequence of the second modified oligonucleotide comprises a complementary region of at least 8 nucleobases that is at least 90% complementary to an equal length portion of the first modified oligonucleotide.

[0237] Embodiment 91. The oligomeric duplex of embodiment 89 or embodiment 90, wherein the first modified oligonucleotide comprises a 5′-stabilized phosphate group.

[0238] Embodiment 92. The oligomeric duplex of embodiment 91, wherein the 5′-stabilized phosphate group comprises a cyclopropyl phosphonate or a vinyl phosphonate.

[0239] Embodiment 93. The oligomeric duplex of any of embodiments 89-92, wherein the first modified oligonucleotide comprises a glycol nucleic acid (GNA) sugar surrogate.

[0240] Embodiment 94. The oligomeric duplex of any of embodiments 89-92, wherein the first modified oligonucleotide comprises a 2′-NMA sugar moiety.

[0241] Embodiment 95. The oligomeric duplex of any of embodiments 89-94, wherein at least one nucleoside of the second modified oligonucleotide comprises a modified sugar moiety.

[0242] Embodiment 96. The oligomeric duplex of embodiment 95, wherein the modified sugar moiety of the second modified oligonucleotide comprises a bicyclic sugar moiety.

[0243] Embodiment 97. The oligomeric duplex of embodiment 96, wherein the bicyclic sugar moiety of the second modified oligonucleotide comprises a 2′-4′ bridge selected from —O—CH₂ and —O—CH(CH₃)—.

[0244] Embodiment 98. The oligomeric duplex of embodiment 95, wherein the modified sugar moiety of the second modified oligonucleotide comprises a non-bicyclic modified sugar moiety.

[0245] Embodiment 99. The oligomeric duplex of embodiment 98, wherein the non-bicyclic modified sugar moiety of the second modified oligonucleotide is a 2′-MOE sugar moiety, a 2′-F sugar moiety, or 2′-OMe sugar moiety.

[0246] Embodiment 100. The oligomeric duplex of any of embodiments 89-99, wherein at least one nucleoside of the second modified oligonucleotide comprises a sugar surrogate.

[0247] Embodiment 101. The oligomeric duplex of any of embodiments 89-100, wherein at least one internucleoside linkage of the second modified oligonucleotide is a modified internucleoside linkage.

[0248] Embodiment 102. The oligomeric duplex of embodiment 101, wherein at least one modified internucleoside linkage of the second modified oligonucleotide is a phosphorothioate internucleoside linkage.

[0249] Embodiment 103. The oligomeric duplex of any of embodiments 89-102, wherein at least one internucleoside linkage of the second modified oligonucleotide is a phosphodiester internucleoside linkage.

[0250] Embodiment 104. The oligomeric duplex of any of embodiments 89-101 or 103, wherein each internucleoside linkage of the second modified oligonucleotide is independently a phosphodiester internucleoside linkage or a phosphorothioate internucleoside linkage.

[0251] Embodiment 105. The oligomeric duplex of any of embodiments 89-104, wherein the second modified oligonucleotide comprises at least one modified nucleobase.

[0252] Embodiment 106. The oligomeric duplex of embodiment 105, wherein the modified nucleobase of the second modified oligonucleotide is 5-methylcytosine.

[0253] Embodiment 107. The oligomeric duplex of any of embodiments 89-106, wherein the second modified oligonucleotide comprises a conjugate group.

[0254] Embodiment 108. The oligomeric duplex of embodiment 107, wherein the conjugate group comprises a conjugate linker and a conjugate moiety.

[0255] Embodiment 109. The oligomeric duplex of embodiment 107 or embodiment 108, wherein the conjugate group is attached to the second modified oligonucleotide at the 5′-end of the second modified oligonucleotide.

[0256] Embodiment 110. The oligomeric duplex of embodiment 107 or embodiment 108, wherein the conjugate group is attached to the second modified oligonucleotide at the 3′-end of the second modified oligonucleotide.

[0257] Embodiment 111. The oligomeric duplex of any of embodiments 107-110, wherein the conjugate group comprises a lipid.

[0258] Embodiment 112. The oligomeric duplex of any of embodiments 107-111, wherein the second modified oligonucleotide comprises a terminal group.

[0259] Embodiment 113. The oligomeric duplex of embodiment 112, wherein the terminal group is an abasic sugar moiety.

[0260] Embodiment 114. The oligomeric duplex of any of embodiments 89-113, wherein the second modified oligonucleotide consists of 10 to 25, 10 to 30, 10 to 50, 12 to 20, 12 to 25, 12 to 30, 12 to 50, 13 to 20, 13 to 25, 13 to 30, 13 to 50, 14 to 20, 14 to 25, 14 to 30, 14 to 50, 15 to 20, 15 to 25, 15 to 30, 15 to 50, 16 to 18, 16 to 20, 16 to 25, 16 to 30, 16 to 50, 17 to 20, 17 to 25, 17 to 30, 17 to 50, 18 to 20, 18 to 22, 18 to 25, 18 to 30, 18 to 50, 19 to 20, 19 to 25, 19 to 30, 19 to 50, 20 to 25, 20 to 30, 20 to 50, 21 to 25, 21 to 30, 21 to 50, 22 to 25, 22 to 30, 22 to 50, 23 to 25, 23 to 30, or 23 to 50 linked nucleosides.

[0261] Embodiment 115. An antisense agent comprising an antisense compound, wherein the antisense compound is the oligomeric compound of any of embodiments 1-64 or the modified oligonucleotide of any of embodiments 65-82.

[0262] Embodiment 116. The antisense agent of embodiment 115, wherein the antisense agent is the oligomeric duplex of any of embodiments 89-114.

[0263] Embodiment 117. The antisense agent of embodiment 115 or embodiment 116, wherein the antisense agent is:
[0264] i. an RNase H agent capable of reducing the amount of IFNAR1 nucleic acid through the activation of RNase H; or
[0265] ii. an RNAi agent capable of reducing the amount of IFNAR1 nucleic acid through the activation of RISC/Ago2.

[0266] Embodiment 118. The antisense agent of any of embodiments 115-117, wherein the antisense agent comprises a conjugate group, wherein the conjugate group comprises a cell-targeting moiety.

[0267] Embodiment 119. A pharmaceutical composition comprising an oligomeric compound of any of embodiments 1-64, a modified oligonucleotide of any of embodiments 65-82, a population of any of embodiments 83-88, an oligomeric duplex of any of embodiments 89-114, or an antisense agent of any of embodiments 115-118, and a pharmaceutically acceptable diluent or carrier.

[0268] Embodiment 120. The pharmaceutical composition of embodiment 119, wherein the pharmaceutically acceptable diluent is phosphate-buffered saline or artificial cerebrospinal fluid.

[0269] Embodiment 121. The pharmaceutical composition of embodiment 120, wherein the pharmaceutical composition consists essentially of the oligomeric compound, the modified oligonucleotide, the population, the oligomeric duplex, or the antisense agent, and the phosphate-buffered saline or the artificial cerebrospinal fluid.

[0270] Embodiment 122. A method comprising administering to a subject an oligomeric compound of any of embodiments 1-64, a modified oligonucleotide of any of embodiments 65-82, a population of any of embodiments 83-88, an oligomeric duplex of any of embodiments 89-114, an antisense agent of any of embodiments 115-118, or a pharmaceutical composition of any of embodiments 119-121.

[0271] Embodiment 123. A method of treating a disease associated with type I interferon signaling comprising administering to a subject having a disease associated with type I interferon signaling a therapeutically effective amount of an oligomeric compound of any of embodiments 1-64, a modified oligonucleotide of any of embodiments 65-82, a population of any of embodiments 83-88, an oligomeric duplex of any of embodiments 89-114, an antisense agent of any of embodiments 115-118, or a pharmaceutical composition of any of embodiments 119-121 thereby treating the disease associated with type I interferon signaling.

[0272] Embodiment 124. The method of embodiment 123, wherein the disease associated with type I interferon signaling is Aicardi-Goutières Syndrome, stroke, neuropsychiatric systemic lupus erythematosus, neuroinflammation following traumatic brain injury, neuro-autoimmune disorders, Alzheimer's disease, post-operative delirium and cognitive decline, cranial radiation-induced cognitive decline, viral infection-induced cognitive decline, neuromyelitis optica, or ataxia telangiectasia.

[0273] Embodiment 125. The method of embodiment 123 or embodiment 124, wherein the disease is associated with an elevated level of interferon-alpha.

[0274] Embodiment 126. The method of any of embodiments 122-125, wherein the subject has a mutation in a gene selected from TREX1, RNASEH2A, RNASEH2B, RNASEH2C, SAMHD1, ADAR1. MDA5, USP18, LSM11, and RNU7-1.

[0275] Embodiment 127. The method of any of embodiments 123-126, wherein administering the oligomeric compound, the modified oligonucleotide, the population, the oligomeric duplex, the antisense agent, or the pharmaceutical composition reduces seizures, dystonia, spasticity, white matter abnormalities, T cell infiltration, B cell infiltration, striatal necrosis, brain atrophy, basal ganglia calcification, or microencephaly; or improves feeding, motor development, language development, or social skill development in the subject.

[0276] Embodiment 128. The method of any of embodiments 123-127, wherein administering the oligomeric compound, the modified oligonucleotide, the population, the oligomeric duplex, the antisense agent, or the pharmaceutical composition reduces interferon alpha and/or lymphocytosis in the cerebrospinal fluid of the subject.

[0277] Embodiment 129. The method of any of embodiments 122-128, wherein the subject is human.

[0278] Embodiment 130. A method of reducing expression of IFNAR1 in a cell comprising contacting the cell with an oligomeric compound of any of embodiments 1-64, a modified oligonucleotide of any of embodiments 65-82, a population of any of embodiments 83-88, an oligomeric duplex of any of embodiments 89-114, an antisense agent of any of embodiments 115-118, or a pharmaceutical composition of any of embodiments 119-121.

[0279] Embodiment 131. The method of embodiment 130, wherein the cell is a neuron or a glial cell, optionally wherein the cell is an astrocyte or microglial cell.

[0280] Embodiment 132. The method of embodiment 130 or embodiment 131, wherein the cell is a human cell.

[0281] Embodiment 133. Use of an oligomeric compound of any of embodiments 1-64, a modified oligonucleotide of any of embodiments 65-82, a population of any of embodiments 83-88, an oligomeric duplex of any of embodiments 89-114, an antisense agent of any of embodiments 115-118, or a pharmaceutical composition of any of embodiments 119-121 for treating a disease associated with type I interferon signaling.

[0282] Embodiment 134. Use of an oligomeric compound of any of embodiments 1-64, a modified oligonucleotide of any of embodiments 65-82, a population of any of embodiments 83-88, an oligomeric duplex of any of embodiments 89-114, an antisense agent of any of embodiments 115-118, or a pharmaceutical composition of any of embodiments 119-121 in the manufacture of a medicament for treating a disease associated with type I interferon signaling.

[0283] Embodiment 135. The use of embodiment 133 or embodiment 134, wherein the disease is associated with an elevated level of interferon alpha.

[0284] Embodiment 136. The use of any of embodiments 133-135, wherein the disease associated with type I interferon signaling is Aicardi-Goutières Syndrome, stroke, neuropsychiatric systemic lupus erythematosus, neuroinflammation following traumatic brain injury, neuro-autoimmune disorders, Alzheimer's disease, post-operative delirium and cognitive decline, cranial radiation-induced cognitive decline, viral infection-induced cognitive decline, neuromyelitis optica, or ataxia telangiectasia.

[0285] Certain Oligomeric Agents and Oligomeric Compounds Certain embodiments provide oligomeric agents targeted to an IFNAR1 nucleic acid. In certain embodiments, the IFNAR1 nucleic acid has the sequence set forth in GENBANK Accession No. NC_000021.9, truncated from 33321001 to 33363000 (SEQ ID NO: 1) or GENBANK Accession No. NM_000629.2 (SEQ ID NO: 2), each of which is incorporated by reference in its entirety. In certain embodiments, the oligomeric agent is a single-stranded oligomeric compound. In certain embodiments, the oligomeric agent is an oligomeric duplex.

[0286] Certain embodiments provide an oligomeric compound comprising a modified oligonucleotide consisting of 8 to 80 linked nucleosides, wherein the nucleobase sequence of the modified oligonucleotide is at least 80% complementary to an equal length portion of an IFNAR1 nucleic acid, and wherein the modified oligonucleotide has at least one modification selected from a modified sugar moiety and a modified internucleoside linkage. In certain embodiments, the IFNAR1 nucleic acid has the nucleobase sequence of SEQ ID NOs: 1 or 2. In certain embodiments, the nucleobase sequence of the modified oligonucleotide is at least 85%, at least 90%, at least 95%, or 100% complementary to an equal length portion of the IFNAR1 nucleic acid.

[0287] In certain embodiments, the nucleobase sequence of the modified oligonucleotide is at least 80% complementary to an equal length portion within nucleobases 3964-3983, 4050-4069, 4573-4592, 4574-4593, 4600-4619, 4601-4620, 4603-4622, 4606-4625, 4619-4638, 4620-4639, 4681-4700, 4716-4735, 4717-4736, 4724-4743, 4725-4744, 4731-4750, 4732-4751, 4733-4752, 4740-4759, 4744-4763, 4771-4790, 4772-4791, 4773-4792, 4786-4805, 4788-4807, 4797-4816, 4798-4817, 4801-4820, 4808-4827, 4812-4831, 4814-4833, 4815-4834, 4823-4838, 4825-4844, 4827-4846, 4841-4860, 4846-4865, 4847-4866, 4862-4881, 4875-4894, 4888-4907, 4889-4908, 4905-4924, 4906-4925, 4942-4961, 4952-4971, 4957-4976, 4958-4977, 5035-5054, 5036-5055, 5061-5080, 5082-5101, 5083-5102, 5084-5103, 5085-5104,5086-5101, 5086-5105,5087-5102, 5087-5106,5089-5104, 5089-5108,5090-5105, 5096-5115,5113-5132, 5114-5133, 5137-5156, 5142-5161, 5147-5162, 5166-5185, 5179-5198, 5181-5200, 5182-5201, 5183-5202, 5519-5538, 5532-5551,5533-5552, 5537-5556,5546-5565, 5598-5617,5599-5618, 5600-5619,5637-5656, 5653-5672,5657-5676, 5669-5688, 5673-5692, 5701-5720, 5702-5721, 5703-5722, 5709-5728, 5755-5774, 5757-5776, 5761-5780, 5850-5869, 5878-5897, 5901-5920, 5902-5921, 5904-5923, 5907-5926, 5910-5929, 5915-5934, 5916-5935, 5917-5936, 5920-5939, 5921-5940, 5922-5941, 5923-5942, 5924-5943, 5931-5950, 5934-5953, 5935-5954, 5955-5974, 5984-6003, 5985-6004, 6028-6047, 6033-6052, 6035-6054, 6051-6070, 6052-6071, 6090-6109, 6111-6130, 6112-6131, 6113-6132, 6145-6164, 6170-6189, 6171-6190, 6195-6214, 6203-6222, 6204-6223, 6206-6225, 6207-6226, 6237-6256, 6264-6283, 6279-6298, 6306-6325, 6357-6376, 6361-6380, 6407-6426, 6408-6427, 6409-6428, 6412-6431, 6420-6439, 6425-6444, 6481-6500, 6482-6501, 6512-6527, 6672-6691, 6674-6689, 6710-6729, 6734-6753, 6749-6768, 6759-6778, 6760-6779, 6831-6850, 6835-6854, 6838-6857, 6916-6935, 6919-6938, 6921-6940, 6926-6945, 6935-6954, 6936-6955, 6941-6960, 6945-6964, 7211-7230, 7230-7249, 7234-7253, 7237-7256, 7307-7326, 7310-7329, 7311-7330, 7312-7331, 7315-7334, 7331-7350, 7437-7456, 7438-7457, 7443-7462, 7458-7477, 7526-7545, 7528-7547, 7543-7562, 7545-7564, 7569-7588, 7570-7589, 7585-7604, 7588-7607, 7589-7608, 7590-7609, 7591-7610, 7592-7607, 7592-7611, 7593-7608, 7593-7612, 7595-7610, 7595-7614, 7596-7611, 7602-7621, 7614-7633, 7617-7636, 7618-7637, 7619-7638, 7639-7658, 7640-7659, 7644-7663, 7649-7664, 7661-7680, 7662-7681, 7663-7682, 7665-7684, 7667-7686, 7668-7687, 7681-7700, 7683-7702, 7684-7703, 7685-7704, 7747-7766, 7771-7790, 7772-7791, 7773-7792, 7774-7793, 7775-7794, 7777-7796, 7778-7797, 7781-7800, 7782-7801, 7784-7803, 7785-7804, 7787-7806, 7788-7807, 7790-7809, 7803-7822, 7805-7824, 7806-7825, 7831-7850, 7867-7882, 7931-7950, 7957-7976, 7978-7997, 7979-7998, 7980-7999, 8144-8163, 8196-8215, 8210-8229, 8211-8230, 8226-8245, 8227-8246, 8231-8250, 8232-8251, 8261-8280, 8271-8286, 8300-8319, 8301-8320, 8310-8329, 8324-8343, 8325-8344, 8339-8358, 8343-8362, 8347-8366, 8351-8370, 8356-8375, 8357-8376, 8359-8378, 8360-8379, 8361-8380, 8362-8381, 8364-8383, 8366-8385, 8368-8387, 8369-8388, 8383-8402, 8387-8406, 8388-8407, 8391-8410, 8392-8411, 8393-8412,8394-8413, 8398-8417,8408-8427, 8409-8428,8421-8440, 8425-8444,8428-8447, 8429-8448,8433-8452, 8443-8462,8444-8463, 8524-8543,8549-8568, 8550-8569,8551-8570, 8584-8603,8624-8643, 8626-8645,8627-8646, 8629-8648, 8630-8649, 8631-8650, 8632-8651, 8636-8655, 8637-8656, 8652-8671, 8653-8672, 8656-8675, 8657-8676, 8659-8678, 8660-8679, 8661-8680, 8682-8701, 8698-8717, 8716-8735, 8717-8736, 8721-8740, 8722-8741, 8724-8743, 8731-8750, 8733-8752, 8748-8767, 8761-8780, 8762-8781, 8763-8782, 8764-8783, 8765-8784, 8770-8789, 8776-8795, 8777-8796,8778-8797, 8782-8801,8791-8806, 8791-8810,8792-8811, 8793-8808,8793-8812, 8794-8809,8794-8813, 8795-8810, 8795-8814, 8807-8826, 8808-8827, 8809-8828, 8822-8841, 8831-8850, 8834-8853, 8835-8854, 8836-8855, 8857-8876, 8938-8957, 8939-8958, 8957-8972, 8980-8999, 9021-9040, 9022-9041, 9025-9044, 9026-9041, 9026-9045, 9038-9057, 9156-9175, 9164-9183, 9204-9223, 9205-9224, 9252-9271, 9253-9272, 9254-9273, 9255-9274, 9257-9276, 9319-9338, 9329-9348, 9374-9393, 9375-9394, 9376-9395, 9377-9396, 9379-9398, 9388-9407, 9393-9412, 9394-9413, 9414-9433, 9416-9435, 9419-9438, 9421-9440, 9422-9441, 9423-9442, 9425-9444, 9446-9465, 9467-9486, 9469-9488, 9499-9518, 9557-9576, 9560-9579, 9561-9580, 9563-9582, 9564-9583, 9566-9585, 9567-9586, 9568-9587, 9569-9588, 9570-9589, 9571-9590, 9578-9597, 9579-9598, 9667-9686, 9668-9687, 9676-9695, 9677-9696, 9685-9704, 9707-9726, 9713-9732, 9714-9733, 9715-9734, 9740-9759, 9741-9760, 9742-9761, 9743-9762, 9744-9763, 9748-9767, 9805-9824, 9806-9825, 9817-9836, 9896-9915, 10107-10126, 10137-10156, 10150-10169, 10270-10289, 10274-10293, 10420-10439, 10421-10440,10628-10647, 10635-10654, 10691-10710, 10700-10719, 10702-10721, 10704-10723, 10705-10724, 10779-10798, 10780-10799, 11007-11026, 11008-11027, 11009-11028, 11016-11035, 11067-11086, 11127-11146, 11168-11187,11170-11189, 11173-11192, 11174-11193, 11175-11194, 11288-11307, 11378-11397, 11379-11398, 11394-11413, 11411-11430, 11412-11431, 11413-11432, 11415-11434, 11417-11436, 11421-11440, 11422-11441, 11423-11442, 11424-11443, 11426-11445,11429-11448, 11495-11514, 11496-11515,11520-11539, 11521-11540, 11522-11541,11548-11567, 11549-11568, 11552-11571, 11572-11591, 11574-11593, 11610-11629, 11614-11633, 11666-11685, 11667-11686, 11669-11688, 11698-11717, 11706-11725, 11752-11771, 11799-11818, 11812-11831, 11816-11835, 11817-11836, 11818-11837, 11847-11866, 11853-11872, 11855-11870, 11882-11897, 11883-11902, 11895-11914, 11896-11915, 11897-11916, 11899-11918, 11900-11919, 11901-11920, 11903-11922, 11904-11923, 11906-11925, 11910-11929, 11911-11930, 11915-11930, 11960-11979, 11964-11983, 11965-11984, 11999-12018, 12025-12044, 12046-12065, 12085-12104, 12086-12105, 12100-12119, 12148-12167, 12180-12199, 12181-12200, 12185-12204, 12187-12206, 12189-12204, 12189-12208, 12191-12210, 12212-12227, 12245-12264, 12247-12266, 12248-12267, 12250-12269, 12309-12324, 12310-12325, 12311-12326, 12313-12332, 12314-12333, 12315-12334, 12347-12366, 12350-12369, 12355-12374, 12377-12396, 12381-12400, 12385-12404, 12386-12405, 12387-12406, 12426-12445, 12427-12446, 12432-12451, 12433-12452, 12471-12490, 12472-12491, 12479-12498, 12482-12501, 12487-12506,12498-12517, 12499-12518, 12500-12519, 12502-12521, 12503-12522, 12504-12523, 12573-12592, 12575-12594, 12576-12595, 12577-12596, 12968-12987, 12969-12988, 13011-13030, 13034-13053, 13177-13196, 13178-13197, 13213-13232, 13215-13234, 13217-13236, 13220-13239, 13337-13356, 13338-13357, 13339-13358, 13367-13386, 13413-13432, 13414-13433, 13427-13446, 13428-13447, 13429-13448, 13430-13449, 13431-13450, 13461-13480, 13490-13509, 13491-13510, 13492-13511, 13493-13512, 13496-13515, 13497-13516, 13498-13517, 13499-13518, 13500-13519, 13505-13524, 13510-13529, 13511-13530, 13532-13551, 13557-13576, 13567-13586, 13568-13587, 13569-13588, 13570-13589, 13580-13599, 13581-13600, 13582-13601, 13586-13605, 13587-13606, 13589-13608, 13590-13609, 13591-13610, 13608-13627, 13644-13663, 13645-13664, 13663-13682, 13718-13737, 13725-13744, 13727-13746, 13728-13747, 13729-13748, 13736-13755, 13737-13756, 13738-13757, 13740-13759, 13743-13762,13754-13773, 13755-13774, 13776-13795, 13818-13837, 13819-13838, 13820-13839, 13830-13849, 13832-13851, 13845-13864, 13864-13883, 13865-13884, 13878-13897, 13911-13930, 13913-13932, 13921-13940, 13924-13943, 13954-13973, 13974-13993, 14016-14035, 14017-14036, 14018-14037, 14019-14038, 14020-14039, 14021-14040, 14023-14042, 14024-14043, 14025-14044, 14026-14045, 14052-14071, 14114-14133, 14141-14160, 14160-14179, 14161-14180, 14163-14182, 14177-14196, 14296-14315, 14300-14319, 14338-14357, 14341-14360, 14343-14362, 14454-14469, 14521-14540, 14549-14568, 14582-14601, 14583-14602, 14598-14617, 14599-14618, 14607-14626, 14613-14632, 14640-14659, 14642-14661, 14644-14663, 14721-14740, 14804-14819, 14830-14849, 14834-14853, 14845-14864, 14848-14867, 15610-15629, 15611-15630, 15626-15645, 15979-15998, 16046-16065, 16055-16074, 16056-16075, 16059-16078, 16060-16079, 16061-16080, 16062-16081, 16063-16082, 16064-16083, 16252-16271, 16253-16272, 16254-16273, 16269-16288, 16292-16311, 16293-16312, 16295-16314, 16296-16315, 16297-16316, 16323-16342, 16324-16343, 16327-16346, 16334-16353, 16350-16369, 16352-16371, 16353-16372, 16354-16373, 16356-16375, 16357-16376, 16360-16379, 16361-16380, 16363-16382, 16365-16384, 16408-16427, 16450-16469, 16463-16482, 16464-16483, 16465-16484, 16466-16485, 16472-16491, 16479-16498, 16539-16558, 16543-16558, 16559-16578, 16577-16596, 16580-16599, 16591-16610, 16650-16669, 16702-16721, 16703-16722, 16705-16724, 16727-16746, 16728-16747, 16730-16749, 16873-16892, 16875-16894, 16907-16926, 16915-16934, 16946-16965, 16947-16966, 16951-16970, 16968-16987, 16980-16999, 16983-17002, 17081-17100, 17084-17103, 17109-17128, 17134-17153, 17135-17154, 17136-17155, 17137-17156, 17195-17214, 17236-17255, 17392-17411, 17556-17575, 17557-17576, 17558-17577, 17617-17636, 17618-17637, 17627-17646, 17631-17650, 17632-17651, 17634-17653, 17649-17668, 17659-17678, 17660-17679, 17708-17727, 18056-18075, 18057-18076, 18058-18077, 18059-18078, 18061-18080, 18088-18107, 18091-18110, 18092-18111, 18093-18112, 18138-18157, 18139-18158, 18149-18168, 18151-18170, 18158-18177, 18159-18178, 18160-18179, 18161-18180, 18165-18184, 18166-18185, 18167-18186, 18171-18190, 18174-18193, 18212-18231, 18231-18250, 18232-18251, 18241-18260, 18242-18261, 18244-18263, 18248-18267, 18279-18298, 18281-18300, 18282-18301, 18312-18331, 18313-18332, 18316-18335, 18318-18337, 18324-18343, 18327-18346, 18329-18348, 18330-18349, 18344-18363, 18345-18364, 18351-18370, 18352-18371, 18367-18386, 18368-18387, 18405-18424, 18420-18439, 18425-18444, 18473-18492, 18487-18506, 18488-18507, 18530-18549, 18533-18552, 18534-18553, 18545-18564, 18564-18583, 18565-18584, 18584-18603, 18590-18609, 18606-18625, 18607-18626, 18608-18627, 18611-18630, 18628-18647, 18714-18733, 19081-19100, 19165-19184, 19173-19192, 19176-19195, 19182-19201, 19210-19229, 19212-19231, 19216-19235, 19237-19256, 19238-19257, 19239-19258, 19283-19302, 19285-19304, 19310-19329, 19311-19330, 19407-19426, 19555-19574, 19587-19606, 19588-19607, 19589-19608, 19593-19612, 19594-19613, 19640-19659, 19656-19671, 19659-19674, 19685-19704, 19687-19706, 19688-19707, 19725-19744, 19741-19760, 19762-19781, 19763-19782, 19778-19797, 19785-19804, 19786-19805, 19793-19812, 19797-19816, 19799-19818, 19800-19819, 19801-19820, 19806-19825, 19813-19832, 19814-19833, 19815-19834, 19820-19839, 19829-19844, 19838-19857, 19841-19860, 19863-19882, 19900-19919, 19922-19941, 19997-20016, 19998-20017, 19999-20018, 20000-20019, 20001-20020, 20002-20021, 20003-20022, 20004-20023, 20008-20027, 20012-20031, 20013-20032, 20014-20033, 20015-20034, 20024-20043, 20032-20051, 20033-20052, 20037-20052, 20038-20057, 20044-20059, 20046-20061, 20075-20094, 20076-20095, 20086-20105, 20087-20106, 20088-20107, 20090-20109, 20091-20110, 20102-20121, 20104-20123, 20105-20124, 20106-20125, 20107-20126, 20108-20127, 20109-20128, 20110-20129, 20111-20130, 20112-20131, 20113-20132, 20114-20133, 20135-20154, 20137-20156, 20138-20157, 20165-20184, 20166-20185, 20167-20186, 20169-20188, 20171-20190, 20172-20191, 20176-20195, 20192-20211, 20203-20222, 20207-20226, 20240-20259, 20250-20269, 20255-20270, 20300-20319, 20342-20361, 20388-20407, 20389-20408, 20390-20409, 20416-20435, 20479-20498, 20485-20504, 20487-20506, 20489-20508, 20491-20510, 20492-20511, 20493-20512, 20495-20514, 20496-20515, 20497-20516, 20498-20517, 20499-20518, 20500-20519, 20501-20520, 20503-20522, 20505-20524, 20506-20525, 20508-20527, 20517-20536, 20528-20547, 20538-20557, 20539-20558, 20587-20606, 20588-20607, 20589-20608, 20590-20609, 20591-20610, 20592-20611, 20593-20612, 20594-20613, 20595-20614, 20596-20615, 20597-20616, 20638-20657, 20639-20658, 20653-20672, 20658-20677, 20996-21015, 20999-21018, 21010-21029, 21012-21031, 21014-21033, 21034-21053, 21049-21068, 21050-21069, 21051-21070, 21053-21072, 21070-21089, 21083-21102, 21085-21104, 21106-21125, 21107-21126, 21108-21127, 21112-21131, 21113-21132, 21115-21134, 21116-21135, 21124-21143, 21125-21144, 21126-21145, 21405-21424, 21952-21971, 22057-22076, 22187-22206, 22191-22210, 22201-22220, 22202-22221, 22203-22222, 22206-22225, 22207-22226, 22217-22236, 22218-22237, 22219-22238, 22222-22241, 22223-22242, 22237-22256, 22238-22257, 22249-22268, 22288-22307, 22294-22313, 22299-22318, 22300-22319, 22308-22327, 22309-22328, 22310-22329, 22342-22361, 22347-22366, 22348-22367, 22358-22377, 22363-22382, 22364-22379, 22365-22380, 22386-22401, 22391-22410, 22411-22430, 22413-22432, 22420-22439, 22424-22443, 22425-22444, 22426-22445, 22436-22455, 22437-22456, 22438-22453, 22446-22465, 22447-22466, 22448-22467, 22449-22468, 22450-22469, 22451-22470, 22452-22471, 22453-22472, 22454-22473, 22455-22474, 22456-22475, 22457-22476, 22458-22477, 22468-22483, 22469-22488, 22470-22489, 22479-22498, 22495-22514, 22496-22515, 22521-22540, 22522-22541, 22524-22543, 22525-22544, 22526-22545, 22527-22546, 22532-22551, 22533-22552, 22541-22560, 22542-22561, 22559-22578, 22560-22579, 22565-22584, 22595-22614, 22597-22616, 22598-22617, 22599-22618, 22603-22622, 22611-22626, 22633-22652, 22638-22657, 22656-22675, 22657-22676, 22669-22688, 22673-22692, 22675-22694, 22699-22718, 22701-22720, 22723-22742, 22746-22765, 22747-22766, 22748-22767, 22768-22787, 22773-22792, 22803-22822, 22804-22823, 22805-22824, 22806-22825, 22808-22827, 22819-22838, 22832-22851, 22843-22862, 22856-22875, 22857-22876, 23134-23153, 23174-23193, 23175-23194, 23224-23243, 23231-23250, 23267-23286, 23269-23288, 23326-23345, 23327-23346, 23328-23347, 23329-23348, 23330-23349, 23336-23355, 23374-23393, 23462-23481, 23677-23696, 24115-24134, 24150-24169, 24153-24172, 24154-24173, 24197-24216, 24198-24217, 24200-24219, 24201-24220, 24236-24255, 24237-24256, 24240-24259, 24241-24260, 24243-24262, 24245-24264, 24268-24287, 24269-24288, 24287-24306, 24299-24318, 24303-24322, 24304-24323, 24305-24324, 24306-24325, 24307-24326, 24309-24328, 24310-24329, 24311-24330, 24312-24331, 24313-24332, 24314-24333, 24315-24330, 24315-24334, 24316-24335, 24318-24337, 24319-24338, 24320-24339, 24341-24360, 24353-24372, 24355-24374, 24370-24389, 24371-24390, 24388-24407, 24389-24408, 24394-24413, 24395-24414, 24454-24473, 24525-24544, 24529-24548, 24579-24598, 24580-24599, 24585-24604, 24586-24605, 24587-24606, 24588-24607, 24589-24608, 24605-24624, 24621-24640, 24622-24641, 24623-24642, 24630-24649, 24633-24652, 24646-24665, 24651-24670, 24698-24717, 24728-24747, 24729-24748, 24731-24750, 24766-24785, 24782-24801, 24783-24802, 24790-24809, 24795-24814, 24796-24815, 24797-24816, 24798-24817, 24799-24818, 24801-24820, 24812-24831, 24813-24832, 24814-24833, 24816-24835, 24818-24837, 24821-24840, 24824-24843, 24831-24850, 24832-24851, 24835-24854, 24838-24857, 24839-24858, 24840-24859, 24841-24860, 24844-24863, 24845-24864, 24846-24865, 24848-24867, 24863-24882, 24864-24883, 24865-24884, 24866-24885, 24867-24886, 24873-24892, 24878-24897, 24885-24904, 24893-24912, 24894-24913, 24913-24932, 24915-24934, 24917-24936, 24918-24937, 24921-24940, 25004-25023, 25018-25037, 25019-25038, 25021-25040, 25022-25041, 25026-25045, 25095-25114, 25096-25115, 25111-25130, 25115-25134, 25116-25135, 25117-25136, 25119-25138, 25133-25152, 25136-25155, 25137-25156, 25138-25157, 25139-25158, 25141-25160, 25143-25162, 25144-25163, 25145-25164, 25146-25165, 25148-25167, 25149-25168, 25150-25169, 25152-25171, 25153-25172, 25154-25173, 25155-25174, 25157-25176, 25158-25177, 25159-25178, 25160-25179, 25161-25180, 25162-25181, 25163-25182, 25164-25183, 25165-25184, 25168-25187, 25169-25188, 25170-25189, 25171-25190, 25174-25193, 25177-25196, 25180-25199, 25181-25200, 25182-25201, 25183-25202, 25186-25205, 25187-25206, 25188-25207, 25189-25208, 25190-25209, 25191-25210, 25196-25215, 25197-25216, 25198-25217, 25200-25219, 25203-25222, 25204-25223, 25205-25224, 25206-25225, 25207-25226, 25211-25230, 25212-25231, 25213-25232, 25214-25233, 25215-25234, 25217-25236, 25218-25237, 25219-25238, 25220-25239, 25222-25241, 25223-25242, 25224-25243, 25226-25245, 25227-25246, 25228-25247, 25230-25249, 25232-25251, 25233-25252, 25235-25254, 25238-25257, 25239-25258, 25247-25266, 25253-25272, 25255-25274, 25256-25275, 25257-25276, 25258-25277, 25261-25280, 25262-25281, 25263-25282, 25264-25283, 25265-25284, 25273-25292, 25279-25298, 25280-25299, 25289-25308, 25293-25312, 25295-25314, 25296-25315, 25297-25316, 25298-25317, 25299-25318, 25309-25328, 25318-25337, 25327-25346, 25328-25347, 25332-25351, 25334-25353, 25335-25354, 25336-25355, 25337-25356, 25338-25357, 25341-25360, 25342-25361, 25343-25362, 25344-25363, 25345-25364, 25346-25365, 25347-25366, 25350-25369, 25351-25370, 25352-25371, 25353-25372, 25385-25404, 25388-25407, 25389-25408, 25390-25409, 25391-25410, 25392-25411, 25393-25412, 25394-25413, 25402-25421, 25403-25422, 25408-25427, 25409-25428, 25413-25432, 25424-25443, 25429-25448, 25430-25449, 25477-25496, 25499-25518, 25500-25519, 25522-25541, 25525-25544, 25526-25545, 25527-25546, 25528-25547, 25529-25548, 25530-25549, 25531-25550, 25532-25551, 25533-25552, 25534-25553, 25535-25554, 25536-25555, 25542-25557, 25543-25558, 25546-25565, 25548-25567, 25550-25569, 25551-25570, 25554-25573, 25556-25575, 25558-25577, 25560-25579, 25561-25580, 25564-25583, 25565-25584, 25568-25587, 25590-25609, 25591-25610, 25606-25625, 25617-25636, 25618-25637, 25619-25638, 25620-25639, 25621-25640, 25622-25641, 25623-25642, 25624-25643, 25625-25644, 25628-25647, 25629-25648, 25630-25649, 25633-25652, 25659-25678, 25660-25679, 25661-25680, 25662-25681, 25664-25683, 25666-25685, 25690-25709, 25691-25710, 25692-25711, 25694-25713, 25695-25714, 25696-25715, 25697-25716, 25698-25717, 25699-25718, 25700-25719, 25701-25720, 25702-25721, 25703-25722, 25704-25723, 25706-25725, 25710-25729, 25712-25731, 25713-25732, 25714-25733, 25715-25734, 25728-25747, 25729-25748, 25730-25749, 25743-25762, 25744-25763, 25745-25764, 25746-25765, 25747-25766, 25748-25767, 25750-25769, 25751-25770, 25752-25771, 25753-25772, 25754-25773, 25755-25774, 25757-25776, 25758-25777, 25759-25778, 25760-25779, 25761-25780, 25762-25781, 25763-25782, 25764-25783, 25765-25784, 25766-25785, 25768-25783, 25775-25794, 25784-25803, 25792-25811, 25793-25812, 25794-25813, 25795-25814, 25799-25818, 25801-25820, 25802-25821, 25803-25822, 25805-25824, 25806-25825, 25807-25826, 25808-25827, 25821-25836, 25824-25843, 25825-25844, 25826-25845, 25841-25860, 25842-25861, 25861-25880, 25862-25881, 25865-25884, 25867-25886, 25868-25887, 25869-25888, 25872-25891, 25875-25894, 25921-25940, 25922-25941, 25923-25942, 25949-25968, 25968-25987, 25989-26008, 25990-26009, 26038-26057, 26040-26059, 26042-26061, 26052-26071, 26055-26074, 26056-26075, 26071-26090, 26087-26106, 26096-26115, 26102-26121, 26105-26124, 26563-26582, 26576-26595, 26586-26605, 26617-26636, 26621-26640, 26631-26650, 26654-26673, 26679-26698, 26680-26699, 26691-26710, 26692-26711, 26697-26716, 26699-26718, 26700-26719, 26715-26734, 26718-26737, 26740-26759, 26742-26761, 26748-26767, 26752-26771, 26758-26777, 26760-26779, 26761-26780, 26786-26805, 26796-26815, 26817-26836, 26818-26837, 26820-26839, 26824-26843, 26825-26844, 26835-26854, 26852-26871, 26868-26887, 26869-26888, 26870-26889, 26871-26890, 26875-26894, 26880-26899, 26882-26901, 26884-26903, 26885-26904, 26886-26905, 26888-26907, 26889-26908, 26891-26910, 26892-26911, 26893-26912, 26902-26921, 26903-26922, 26905-26924, 26925-26944, 26930-26949, 26936-26955, 26937-26956, 26938-26957, 26941-26960, 26942-26961, 26943-26962, 26944-26963, 26947-26966, 26950-26969, 26952-26971, 26953-26972, 26954-26973, 26956-26975, 26957-26976, 26958-26977, 26959-26978, 26976-26995, 26977-26996, 26978-26997, 26980-26999, 26981-27000, 26982-27001, 26983-27002, 26984-27003, 26985-27004, 26987-27006, 27007-27026, 27008-27027, 27009-27028, 27010-27029, 27011-27030, 27013-27032, 27014-27033, 27015-27034, 27016-27035, 27017-27036, 27018-27037, 27023-27042, 27026-27045, 27027-27046, 27037-27056, 27038-27057, 27043-27062, 27044-27063, 27045-27064, 27046-27065, 27047-27066, 27048-27067, 27067-27086, 27068-27087, 27069-27088, 27070-27089, 27075-27094, 27076-27095, 27090-27109, 27097-27116, 27105-27124, 27107-27126, 27112-27131, 27181-27200, 27192-27211, 27206-27225, 27207-27226, 27208-27227, 27212-27231, 27221-27240, 27222-27241, 27223-27242, 27244-27263, 27245-27264, 27259-27278, 27260-27279, 27274-27293, 27275-27294, 27276-27295, 27286-27305, 27287-27306, 27289-27308, 27290-27309, 27336-27355, 27341-27360, 27342-27361, 27345-27364, 27349-27368, 27388-27407, 27392-27411, 27393-27412, 27414-27433, 27416-27435, 27420-27439, 27421-27440, 27434-27453, 27435-27454, 27436-27455, 27437-27456, 27438-27457, 27439-27458, 27440-27459, 27447-27466, 27455-27474, 27456-27475, 27484-27503, 27498-27517, 27499-27518, 27500-27519, 27511-27530, 27512-27531, 27529-27548, 27543-27562, 27545-27564, 27547-27566, 27548-27567, 27549-27568, 27551-27570, 27797-27816, 27805-27824, 27806-27825, 27807-27826, 27808-27827, 27809-27828, 27810-27829, 27811-27830, 27812-27831, 27814-27833, 27815-27834, 27839-27858, 27840-27859, 27869-27888, 27870-27889, 27871-27890, 27930-27949, 27931-27950, 27934-27953, 27935-27954, 27936-27955, 27941-27960, 27965-27984, 27966-27985, 27977-27996, 27978-27997, 27988-28007, 27992-28011, 28028-28047, 28032-28051, 28033-28052, 28042-28061, 28045-28064, 28090-28109, 28092-28111, 28097-28116, 28098-28117, 28103-28122, 28116-28135, 28120-28139, 28124-28143, 28141-28160, 28145-28164, 28166-28185, 28193-28212, 28194-28213, 28195-28214, 28226-28245, 28227-28246, 28230-28249, 28253-28272, 28254-28273, 28255-28274, 28259-28278, 28263-28282, 28274-28293, 28277-28296, 28285-28304, 28294-28313, 28295-28314, 28307-28326, 28308-28327, 28310-28329, 28311-28330, 28312-28331, 28329-28348, 28358-28377, 28421-28440, 28436-28455, 28441-28460, 28443-28458, 28448-28463, 28452-28471, 28453-28468, 28482-28501, 28493-28512, 28494-28513, 28506-28525, 28534-28553, 28536-28555, 28537-28556, 28538-28557, 28541-28560, 28549-28568, 28552-28571, 28554-28573, 28555-28574, 28556-28575, 28557-28576, 28558-28577, 28559-28578, 28560-28579, 28561-28580, 28575-28594, 28576-28595, 28577-28596, 28579-28598, 28580-28599, 28581-28600, 28582-28601, 28588-28607, 28590-28609, 28591-28610, 28592-28611, 28594-28613, 28595-28614, 28596-28615, 28605-28624, 28606-28625, 28607-28626, 28609-28628, 28610-28629, 28611-28630, 28612-28631, 28621-28640, 28622-28641, 28623-28642, 28624-28643, 28625-28644, 28626-28645, 28627-28646, 28636-28655, 28637-28656, 28638-28657, 28639-28658, 28648-28667, 28814-28833, 28815-28834, 28927-28946, 28928-28947, 28929-28948, 28930-28949, 28941-28960, 28942-28961, 28957-28976, 28960-28979, 28961-28980, 28962-28981, 28976-28995, 28986-29005, 28987-29006, 28988-29007, 28989-29008, 28993-29012, 28994-29013, 28995-29014, 28996-29015, 28997-29016, 29027-29046, 29028-29047, 29029-29048, 29051-29070, 29052-29071, 29073-29092, 29076-29095, 29088-29107, 29098-29117, 29100-29119, 29116-29135, 29117-29136, 29134-29153, 29164-29183, 29165-29184, 29166-29185, 29169-29188, 29175-29194, 29176-29195, 29177-29196, 29202-29221, 29243-29262, 29325-29344, 29326-29345, 29327-29346, 29328-29347, 29335-29354, 29336-29355, 29352-29371, 29353-29372, 29354-29373, 29360-29379, 29365-29384, 29366-29385, 29368-29387, 29370-29389, 29391-29410, 29446-29465, 29447-29466, 29448-29467, 29449-29468, 29454-29473, 29455-29474, 29456-29475, 29458-29477, 29461-29480, 29462-29481, 29464-29479, 29464-29483, 29465-29484, 29466-29485, 29467-29486, 29468-29487, 29469-29488, 29470-29489, 29471-29490, 29472-29491, 29475-29494, 29476-29495, 29487-29506, 29488-29507, 29491-29510, 29496-29515, 29502-29521, 29503-29522, 29504-29523, 29505-29524, 29506-29525, 29507-29526, 29508-29527, 29509-29528, 29510-29529, 29511-29530, 29512-29531, 29515-29534, 29516-29535, 29517-29536, 29518-29537, 29519-29538, 29536-29551, 29569-29588, 29574-29593, 29673-29692, 29702-29721, 29703-29722, 29725-29744, 29726-29745, 29727-29746, 29730-29749, 29744-29763, 29745-29764, 29746-29765, 29777-29796, 29779-29798, 29788-29807, 29789-29808, 29790-29809, 29795-29814, 29796-29815, 29797-29816, 29807-29826, 29811-29830, 29819-29838, 29822-29841, 29892-29911, 29893-29912, 29918-29937, 29921-29940, 29922-29941, 29923-29942, 29924-29943, 29926-29945, 29927-29946, 29928-29943, 29930-29949, 29951-29970, 29954-29973, 29957-29976, 29959-29978, 29960-29979, 29961-29980, 29963-29982, 29964-29983, 29965-29984, 29966-29985, 29967-29986, 29968-29987, 29972-29991, 29973-29992, 29974-29993, 29976-29995, 29977-29996, 29978-29997, 29979-29998, 29980-29999, 29981-30000, 29982-30001, 29983-30002, 29984-30003, 29985-30004, 29986-30005, 29987-30006, 29988-30007, 29989-30008, 30002-30021, 30006-30025, 30018-30037, 30021-30040, 30022-30041, 30024-30043, 30029-30048, 30031-30050, 30032-30051, 30033-30052, 30035-30054, 30037-30056, 30039-30058, 30042-30061, 30059-30078, 30063-30082, 30064-30083, 30075-30094, 30076-30095, 30079-30098, 30082-30101, 30086-30105, 30088-30107, 30089-30108, 30098-30117, 30100-30119, 30109-30128, 30110-30129, 30111-30130, 30112-30131, 30113-30132, 30115-30134, 30130-30149, 30131-30150, 30132-30151, 30142-30161, 30180-30199, 30181-30200, 30182-30201, 30183-30202, 30184-30203, 30185-30204, 30187-30206, 30188-30207, 30189-30208, 30192-30211, 30199-30218, 30204-30223, 30205-30224, 30212-30231, 30252-30271, 30254-30273, 30267-30286, 30268-30287, 30269-30288, 30272-30291, 30285-30304, 30293-30312, 30294-30313, 30295-30314, 30296-30315, 30309-30328, 30345-30364, 30350-30369, 30351-30370, 30378-30397, 30379-30398, 30380-30399, 30384-30403, 30386-30405, 30387-30406, 30396-30415, 30428-30447, 30448-30467, 30458-30477, 30460-30479, 30483-30502, 30508-30527, 30509-30528, 30510-30529, 30602-30621, 30604-30623, 30777-30796, 30779-30798, 30780-30799, 30781-30800, 30782-30801, 30783-30802, 30784-30803, 30785-30804, 30790-30809, 30791-30810, 30792-30811, 30793-30812, 30794-30813, 30866-30885, 30985-31004, 30992-31011, 30994-31013, 31011-31030, 31015-31034, 31019-31038, 31041-31060, 31043-31062, 31052-31071, 31054-31073, 31060-31079, 31064-31083, 31066-31085, 31067-31086, 31070-31089, 31071-31090, 31072-31091, 31073-31092, 31074-31093, 31075-31094, 31076-31095, 31077-31096, 31078-31097, 31079-31098, 31082-31101, 31104-31123, 31107-31126, 31118-31137, 31128-31147, 31129-31148, 31130-31149, 31173-31192, 31215-31234, 31222-31241, 31224-31243, 31226-31245, 31236-31255, 31237-31256, 31241-31260, 31242-31261, 31243-31258, 31254-31273, 31255-31274, 31256-31275, 31270-31289, 31280-31299, 31282-31301, 31284-31303, 31285-31304, 31286-31305, 31288-31307, 31289-31308, 31291-31310, 31292-31311, 31293-31312, 31294-31313, 31295-31314, 31296-31315, 31313-31332, 31315-31334, 31317-31336, 31444-31463, 31456-31475, 31457-31476, 31458-31477, 31658-31677, 31659-31678, 31660-31679, 31674-31693, 31676-31695, 31677-31696, 31680-31699, 31681-31700, 31682-31701, 31683-31702, 31707-31726, 31708-31727, 31710-31729, 31719-31738, 31720-31739, 31730-31749, 31731-31750, 31735-31754, 31737-31756, 31738-31757, 31740-31759, 31741-31760, 31751-31770, 31752-31771, 31755-31774, 31758-31777, 31765-31780, 31765-31784, 31766-31785, 31792-31811, 31793-31812, 31810-31829, 31811-31830, 31812-31831, 31813-31832, 31814-31833, 31815-31834, 31816-31835, 31818-31837, 31840-31859, 31842-31861, 31850-31869, 31851-31870, 31852-31871, 31853-31872, 31854-31873, 31855-31874, 31864-31883, 31865-31884, 31883-31902, 31886-31905, 31888-31907, 31941-31960, 31946-31965, 32006-32025, 32096-32115, 32246-32265, 32259-32278, 32353-32372, 32354-32373, 32355-32374, 32356-32375, 32357-32376, 32359-32378, 32367-32386, 32401-32420, 32424-32439, 32451-32470, 32456-32475, 32457-32476, 32473-32492, 32480-32499, 32554-32573, 32661-32680, 32662-32681, 32676-32695, 32677-32696, 32728-32747, 32768-32787, 32813-32828, 32814-32833, 32825-32844, 32874-32893, 32875-32894, 32889-32908, 32947-32966, 32957-32976, 32961-32980, 32962-32981, 32967-32986, 32968-32987, 32969-32988, 32970-32989, 33037-33056, 33046-33065, 33346-33365, 33347-33366, 33356-33375, 33357-33376, 33358-33377, 33359-33378, 33361-33380, 33435-33454, 33437-33456, 33438-33457, 33439-33458, 33443-33462, 33446-33465, 33456-33475, 33475-33494, 33476-33495, 33493-33512, 33496-33515, 33497-33516, 33498-33517, 33507-33526, 33508-33527, 33511-33530, 33549-33568, 33571-33590, 33587-33606, 33588-33607, 33600-33619, 33601-33620, 33604-33623, 33605-33624, 33606-33625, 33619-33638, 33622-33641, 33625-33644, 33626-33645, 33631-33646, 33636-33655, 33650-33669, 33679-33698, 33680-33699, 33683-33702, 33684-33703, 33685-33704, 33686-33705, 33688-33707, 33706-33725, 33713-33732, 33714-33733, 33754-33773, 33756-33775, 33762-33781, 33764-33783, 33765-33784, 33769-33788, 33793-33812, 33807-33826, 33865-33884, 33867-33886, 33869-33888, 33883-33902, 33884-33903, 33922-33941, 33946-33965, 33948-33967, 33950-33969, 33951-33970, 33952-33971, 33953-33972, 33958-33977, 33959-33978, 34109-34128, 34110-34129, 34113-34132, 34117-34136, 34129-34144, 34157-34176, 34158-34177, 34159-34178, 34160-34179, 34162-34181, 34165-34184, 34166-34185, 34178-34197, 34198-34217, 34214-34233, 34223-34242, 34278-34297, 34298-34317, 34309-34328, 34327-34346, 34329-34348, 34330-34349, 34369-34388, 34383-34402, 34386-34405, 34387-34406, 34407-34426, 34409-34428, 34411-34430, 34418-34437, 34438-34457, 34440-34459, 34475-34494, 34479-34498, 34481-34500, 34485-34504, 34487-34506, 34488-34507, 34489-34508, 34490-34509, 34492-34511, 34493-34512, 34494-34513, 34502-34521, 34504-34523, 34505-34524, 34506-34525, 34515-34534, 34536-34555, 34537-34556, 34547-34566, 34548-34567, 34564-34583, 34566-34585, 34567-34586, 34568-34587, 34581-34600, 34582-34601, 34647-34666, 34648-34667, 34649-34668, 34652-34671, 34655-34674, 34656-34675, 34657-34676, 34712-34731, 34718-34737, 34719-34738, 35016-35035, 35017-35036, 35018-35037, 35019-35038, 35021-35040, 35023-35042, 35057-35076, 35058-35077, 35059-35078, 35069-35088, 35096-35115, 35097-35116, 35100-35119, 35101-35120, 35102-35121, 35104-35123, 35267-35286, 35289-35308, 35336-35355, 35337-35356, 35343-35362, 35344-35363, 35345-35364, 35349-35368, 35350-35369, 35351-35370, 35381-35400, 35382-35401, 35385-35404, 35391-35406, 35396-35411, 35401-35420, 35402-35421, 35423-35442, 35424-35443, 35425-35444, 35435-35454, 35438-35457, 35442-35461, 35445-35464, 35446-35465, 35495-35510, 35502-35517, 35509-35524, 35511-35530, 35512-35531, 35514-35533, 35515-35534, 35516-35535, 35520-35535, 35533-35552, 35543-35562, 35547-35566, 35570-35589, 35613-35632, 35615-35634, 35619-35638, 35620-35639, 35621-35640, 35631-35650, 35639-35658, 35640-35659, 35642-35661, 35643-35662, 35644-35663, 35652-35671, 35653-35672, 35654-35673, 35655-35674, 35657-35676, 35664-35683, 35667-35686, 35668-35687, 35675-35690, 35681-35700, 35683-35702, 35685-35704, 35705-35724, 35706-35725, 35709-35728, 35711-35730, 35712-35731, 35719-35738, 35720-35739, 35736-35755, 35745-35764, 35746-35765, 35747-35766, 35748-35767, 35753-35772, 35764-35783, 35765-35784, 35769-35788, 35783-35802, 35784-35803, 35788-35807, 35789-35808, 35799-35818, 35802-35821, 35809-35828, 35810-35829, 35811-35830, 35812-35831, 35815-35834, 35816-35835, 35817-35836, 35818-35837, 35819-35838, 35820-35839, 35830-35849, 35844-35859, 35877-35896, 35879-35898, 35881-35900, 35882-35901, 35914-35933, 35987-36006, 35988-36007, 35992-36011, 35994-36013, 35995-36014, 35996-36015, 35998-36017, 36007-36026, 36021-36040, 36022-36041, 36023-36042, 36065-36084, 36068-36087, 36069-36088, 36109-36128, 36112-36131, 36113-36132, 36116-36135, 36121-36140, 36124-36143, 36125-36144, 36181-36200, 36182-36201, 36186-36205, 36248-36267, 36251-36270, 36262-36281, 36280-36299, 36281-36300, 36286-36305, 36287-36306, 36288-36307, 36289-36308, 36292-36311, 36313-36332, 36426-36445, 36833-36852, 36959-36978, 36997-37012, 37002-37021, 37018-37037, 37019-37038, 37020-37039, 37029-37048, 37031-37050, 37032-37051, 37033-37052, 37034-37053, 37035-37054, 37036-37055, 37070-37089, 37071-37090, 37074-37093, 37075-37094, 37076-37095, 37086-37105, 37087-37106, 37088-37107, 37089-37108, 37093-37112, 37125-37144, 37135-37154, 37213-37232, 37224-37243, 37241-37260, 37266-37285, 37267-37286, 37280-37299, 37281-37300, 37291-37310, 37292-37311, 37308-37327, 37318-37337, 37340-37355, 37341-37356, 37343-37358, 37353-37372, 37355-37370, 37356-37375, 37367-37386, 37368-37387, 37369-37388, 37370-37389, 37375-37394, 37390-37409, 37391-37410, 37392-37407, 37392-37411, 37401-37420, 37402-37421, 37406-37425, 37407-37426, 37416-37435, 37420-37439, 37425-37444, 37436-37455, 37480-37499, 37481-37500, 37482-37501, 37483-37502, 37529-37548, 37530-37549, 37531-37550, 37562-37581, 37614-37633, 37617-37636, 37634-37649, 37637-37656, 37660-37679, 37665-37684, 37676-37695, 37680-37699, 37886-37905, 37888-37907, 37889-37908, 37890-37909, 37923-37942, 37924-37943, 37968-37983, 38042-38061, 38058-38073, 38060-38079, 38095-38114, 38113-38132, 38114-38133, 38115-38134, 38116-38135, 38121-38140, 38139-38158, 38140-38159, 38145-38164, 38154-38173, 38155-38174, 38156-38175, 38157-38176, 38159-38178, 38168-38187, 38171-38190, 38172-38191, 38175-38194, 38176-38195, 38177-38196, 38181-38196, 38204-38223, 38205-38224, 38272-38291, 38273-38292, 38277-38296, 38279-38298, 38295-38314, 38318-38337, 38319-38338, 38321-38340, 38322-38341, 38326-38345, 38328-38347, 38361-38380, 38362-38381, 38363-38382, 38367-38386, 38375-38394, 38417-38436, 38468-38487, 38469-38488, 38470-38489, 38516-38535, 38537-38556, 38540-38559, 38542-38561, 38552-38571, 38553-38572, 38557-38576, 38583-38602, 38620-38639, 38623-38642, 38633-38652, 38659-38678, 38698-38717, 38720-38739, 38743-38762, 38745-38764, 38747-38766, 38783-38802, 38785-38804, 38788-38807, 38789-38808, 38790-38809, 38791-38810, 38792-38811, 38829-38848, 38830-38845, 38831-38850, 39011-39026, or 39014-39029 of SEQ ID NO: 1. In certain embodiments, the nucleobase sequence of the modified oligonucleotide is at least 85%, at least 90%, at least 95%, or 100% complementary to the equal length portion of the IFNAR1 nucleic acid.

[0288] In certain embodiments, the nucleobase sequence of the modified oligonucleotide is at least 80% complementary to an equal length portion within nucleobases 216-235, 218-237, 220-239, 521-540, 670-689, 1119-1138, 1283-1302, 1284-1303, 1287-1306, 1288-1307, 1580-1599, 1581-1600 of SEQ ID NO: 2. In certain embodiments, the nucleobase sequence of the modified oligonucleotide is at least 85%, at least 90%, at least 95%, or 100% complementary to the equal length portion of the IFNAR1 nucleic acid.

[0289] In certain embodiments, the nucleobase sequence of the modified oligonucleotide is at least 80% complementary to an equal length portion within nucleobases 5084-5133, 19997-20061, 20076-20133, 20528-2061120616, 22294-22329, 22453-22476, 2259722595-22626, 25530-25565, 25606-25652, 25710-25767, 25768-25827, 28421-28468, 29924-29949, 29968-30021, 31072-31096, 31792-31837, 32353-32386, or 35016-35042 of SEQ ID NO: 1. In certain embodiments, the nucleobase sequence of the modified oligonucleotide is at least 80% complementary to an equal length portion within nucleobases 20003-20022, 20104-20123, 20591-20610, 22455-22474, 22456-22475, 29981-30000, of SEQ ID NO: 1. In certain embodiments, the nucleobase sequence of the modified oligonucleotide is at least 85%, at least 90%, at least 95%, or 100% complementary to the equal length portion of the IFNAR1 nucleic acid.

[0290] Certain embodiments provide an oligomeric compound comprising a modified oligonucleotide consisting of 8 to 80 linked nucleosides, wherein the nucleobase sequence of the modified oligonucleotide comprises at least 8, at least 9, at least 10, at least 11, at least 12, at least 13, at least 14, at least 15, or at least 16 contiguous nucleobases of any of the nucleobase sequences of SEQ ID NOs: 12-2687.

[0291] Certain embodiments provide an oligomeric compound comprising a modified oligonucleotide consisting of 16 to 80 linked nucleosides, wherein the nucleobase sequence of the modified oligonucleotide comprises the nucleobase sequence of any of nucleobase sequences of SEQ ID NOs: 12-89.

[0292] Certain embodiments provide an oligomeric compound comprising a modified oligonucleotide consisting of 16 linked nucleosides, wherein the modified oligonucleotide has a nucleobase sequence consisting of the nucleobase sequence of any of the nucleobase sequences of SEQ ID NOs: 12-89.

[0293] Certain embodiments provide an oligomeric compound comprising a modified oligonucleotide consisting of 20 to 80 linked nucleosides, wherein the nucleobase sequence of the modified oligonucleotide comprises the nucleobase sequence of any of nucleobase sequences of SEQ ID NOs: 12-2687.

[0294] Certain embodiments provide an oligomeric compound comprising a modified oligonucleotide consisting of 20 linked nucleosides, wherein the modified oligonucleotide has a nucleobase sequence consisting of the nucleobase sequence of any of the nucleobase sequences of SEQ ID NOs: 90-2687.

[0295] Certain embodiments provide an oligomeric compound comprising a modified oligonucleotide consisting of 16 to 80 linked nucleosides, wherein the nucleobase sequence of the modified oligonucleotide comprises at least 8, at least 9, at least 10, at least 11, at least 12, at least 13, at least 14, at least 15, or at least 16 contiguous nucleobases of any of the nucleobase sequences of SEQ ID NOs: 1317, 2040, 2625, 2668, 2670, or 2679.

[0296] Certain embodiments provide an oligomeric compound comprising a modified oligonucleotide consisting of 20 to 80 linked nucleosides, wherein the nucleobase sequence of the modified oligonucleotide comprises the nucleobase sequence of any of the nucleobase sequences of SEQ ID NOs: 1317, 2040, 2625, 2668, 2670, or 2679.

[0297] Certain embodiments provide an oligomeric compound comprising a modified oligonucleotide consisting of 20 linked nucleosides, wherein the modified oligonucleotide has a nucleobase sequence consisting of the nucleobase sequence of any of the nucleobase sequences of SEQ ID NOs: SEQ ID NOs: 1317, 2040, 2625, 2668, 2670, or 2679.

[0298] In any of the oligomeric compounds provided herein, the nucleobase sequence of the modified oligonucleotide can be at least 85%, at least 90%, at least 95%, or 100% complementary to an equal length portion of an IFNAR1 nucleic acid, wherein the IFNAR1 nucleic acid has the nucleobase sequence of SEQ ID NOs: 1 or 2.

[0299] In any of the oligomeric compounds provided herein, the modified oligonucleotide can consist of 10 to 25, 10 to 30, 10 to 50, 12 to 20, 12 to 25, 12 to 30, 12 to 50, 13 to 20, 13 to 25, 13 to 30, 13 to 50, 14 to 20, 14 to 25, 14 to 30, 14 to 50, 15 to 20, 15 to 25, 15 to 30, 15 to 50, 16 to 18, 16 to 20, 16 to 25, 16 to 30, 16 to 50, 17 to 20, 17 to 25, 17 to 30, 17 to 50, 18 to 20, 18 to 22, 18 to 25, 18 to 30, 18 to 50, 19 to 20, 19 to 25, 19 to 30, 19 to 50, 20 to 25, 20 to 30, 20 to 50, 21 to 25, 21 to 30, 21 to 50, 22 to 25, 22 to 30, 22 to 50, 23 to 25, 23 to 30, or 23 to 50 linked nucleosides.

[0300] In any of the oligomeric compounds provided herein, at least one nucleoside of the modified oligonucleotide can comprise a modified sugar moiety. In certain embodiments, the modified sugar moiety comprises a bicyclic sugar moiety, such as a bicyclic sugar moiety comprising a 2′-4′ bridge selected from —O—CH₂— and —O—CH(CH₃)—. In certain embodiments, the modified sugar moiety comprises a non-bicyclic modified sugar moiety, such as a 2′-MOE sugar moiety or 2′-OMe sugar moiety.

[0301] In any of the oligomeric compounds provided herein, at least one nucleoside of the modified oligonucleotide compound can comprise a sugar surrogate.

[0302] In any of the oligomeric compounds provided herein, at least one internucleoside linkage of the modified oligonucleotide can comprise a modified internucleoside linkage, such as a phosphorothioate internucleoside linkage. In certain embodiments, each internucleoside linkage of the modified oligonucleotide can be a modified internucleoside linkage or each internucleoside linkage of the modified oligonucleotide can be a phosphorothioate internucleoside linkage. In certain embodiments, at least one internucleoside linkage of the modified oligonucleotide can be a phosphodiester internucleoside linkage. In certain embodiments, each internucleoside linkage of the modified oligonucleotide can be independently selected from a phosphodiester internucleoside linkage or a phosphorothioate internucleoside linkage. In certain embodiments, at least 2, at least 3, at least 4, at least 5, or at least 6 internucleoside linkages of the modified oligonucleotide can be phosphodiester internucleoside linkages. In certain embodiments, at least 10, at least 11, at least 12, at least 13, at least 14, at least 15, at least 16, at least 17, or at least 18 internucleoside linkages of the modified oligonucleotide can be phosphorothioate internucleoside linkages.

[0303] In any of the oligomeric compounds provided herein, at least one nucleobase of the modified oligonucleotide can be a modified nucleobase, such as 5-methyl cytosine. In certain embodiments, each cytosine is 5-methyl cytosine.

[0304] In any of the oligomeric compounds provided herein, the modified oligonucleotide can comprise a deoxy region consisting of 5-12 contiguous 2′-deoxynucleosides. In certain embodiments, each nucleoside of the deoxy region is a 2′-β-D-deoxynucleoside. In certain embodiments, the deoxy region consists of 6, 7, 8, 9, 10, or 6-10 linked nucleosides. In certain embodiments, each nucleoside immediately adjacent to the deoxy region comprises a modified sugar moiety. In certain embodiments, the deoxy region is flanked on the 5′-side by a 5′ external region consisting of 1-6 linked 5′ external region nucleosides and on the 3′-side by a 3′ external region consisting of 1-6 linked 3′ external region nucleosides; wherein the 3′-most nucleoside of the 5′ external region comprises a modified sugar moiety and the 5′-most nucleoside of the 3′ external region comprises a modified sugar moiety. In certain embodiments, each nucleoside of the 3′ external region comprises a modified sugar moiety. In certain embodiments, each nucleoside of the 5′ external region comprises a modified sugar moiety.

### 1. Compound No. 1489477

[0305] In certain embodiments, Compound No. 1489477 is characterized as a 6-10-4 MOE gapmer having a sequence (from 5′ to 3′) of CTTTTTCTGCTCTTATACGC (SEQ ID NO 2668), wherein each of nucleosides 1-6 and 17-20 (from 5′ to 3′) are 2′-MOE nucleosides and each of nucleosides 7-16 are 2′-β-D-deoxynucleosides, wherein the internucleoside linkages between nucleosides 2 to 3, 3 to 4, 4 to 5, 5 to 6, 6 to 7, and 17 to 18 are phosphodiester internucleoside linkages, the internucleoside linkages between nucleosides 1 to 2, 7 to 8, 8 to 9, 9 to 10, 10 to 11, 11 to 12, 12 to 13, 13 to 14, 14 to 15, 15 to 16, 16 to 17, 18 to 19, and 19 to 20 are phosphorothioate internucleoside linkages, and wherein each cytosine is a 5-methyl cytosine.

[0306] In certain embodiments, Compound No. 1489477 is represented by the following chemical notation: ^{m}CₑₛTₑₒTₑₒTₑₒTₑₒTₑₒ^{m}C_{ds}T_{ds}G_{ds}^{m}C_{ds}T_{ds}^{m}C_{ds}T_{ds}T_{ds}A_{ds}T_{ds}Aₑₒ^{m}CₑₛGₑₛ^{m}Cₑ (SEQ ID NO 2668), wherein:
[0307] A=an adenine nucleobase,
[0308] ^{m}C=a 5-methyl cytosine nucleobase,
[0309] G=a guanine nucleobase,
[0310] T=a thymine nucleobase,
[0311] e=a 2′-MOE sugar moiety,
[0312] d=a 2′-β-D-deoxyribosyl sugar moiety,
[0313] s=a phosphorothioate internucleoside linkage, and
[0314] o=a phosphodiester internucleoside linkage.

[0315] In certain embodiments Compound No. 1489477 is represented by the following chemical structure:

[chemical structure]

[0316] In certain embodiments, an oligomeric compound comprises the sodium salt or the potassium salt of the modified oligonucleotide represented by Structure 1.

[0317] In certain embodiments the sodium salt of Compound No. 1489477 is represented by the following chemical structure:

[chemical structure]

### 2. Compound No. 1489494

[0318] In certain embodiments, Compound No. 1489494 is characterized as a 6-10-4 MOE gapmer having a sequence (from 5′ to 3′) of CTGTTTTACATTTTTTTTCC (SEQ ID NO 2040), wherein each of nucleosides 1-6 and 17-20 (from 5′ to 3′) are 2′-MOE nucleosides and each of nucleosides 7-16 are 2′-β-D-deoxynucleosides, wherein the internucleoside linkages between nucleosides 2 to 3, 3 to 4, 4 to 5, 5 to 6, 6 to 7, and 17 to 18 are phosphodiester internucleoside linkages, the internucleoside linkages between nucleosides 1 to 2, 7 to 8, 8 to 9, 9 to 10, 10 to 11, 11 to 12, 12 to 13, 13 to 14, 14 to 15, 15 to 16, 16 to 17, 18 to 19, and 19 to 20 are phosphorothioate internucleoside linkages, and wherein each cytosine is a 5-methyl cytosine.

[0319] In certain embodiments, Compound No. 1489494 is represented by the following chemical notation: ^{m}CₑₛTₑₒGₑₒTₑₒTₑₒTₑₒT_{ds}A_{ds}^{m}C_{ds}A_{ds}T_{ds}T_{ds}T_{ds}T_{ds}T_{ds}T_{ds}TₑₒTₑₛ^{m}Cₑₛ^{m}Cₑ (SEQ ID NO 2040), wherein:
[0320] A=an adenine nucleobase,
[0321] ^{m}C=a 5-methyl cytosine nucleobase,
[0322] G=a guanine nucleobase,
[0323] T=a thymine nucleobase,
[0324] e=a 2′-MOE sugar moiety,
[0325] d=a 2′-β-D-deoxyribosyl sugar moiety,
[0326] s=a phosphorothioate internucleoside linkage, and
[0327] o=a phosphodiester internucleoside linkage.

[0328] In certain embodiments Compound No. 1489494 is represented by the following chemical structure:

[chemical structure]

[0329] In certain embodiments, an oligomeric compound comprises the sodium salt or the potassium salt of the modified oligonucleotide represented by Structure 3.

[0330] In certain embodiments the sodium salt of Compound No. 1489494 is represented by the following chemical structure:

[chemical structure]

### 3. Compound No. 1489525

[0331] In certain embodiments, Compound No. 1489525 is characterized as a 5-10-5 MOE gapmer having a sequence (from 5′ to 3′) of TTTATCCAATTATCCATCCC (SEQ ID NO 2670), wherein each of nucleosides 1-5 and 16-20 (from 5′ to 3′) are 2′-MOE nucleosides and each of nucleosides 6-15 are 2′-β-D-deoxynucleosides, wherein the internucleoside linkages between nucleosides 2 to 3, 3 to 4, 4 to 5, 16 to 17, and 17 to 18 are phosphodiester internucleoside linkages, the internucleoside linkages between nucleosides 1 to 2, 5 to 6, 6 to 7, 7 to 8, 8 to 9, 9 to 10, 10 to 11, 11 to 12, 12 to 13, 13 to 14, 14 to 15, 15 to 16, 18 to 19, and 19 to 20 are phosphorothioate internucleoside linkages, and wherein each cytosine is a 5-methyl cytosine.

[0332] In certain embodiments, Compound No. 1489525 is represented by the following chemical notation: TₑₛTₑₒTₑₒAₑₒTₑₛ^{m}C_{ds}C_{ds}A_{ds}A_{ds}T_{ds}T_{ds}A_{ds}T_{ds}^{m}C_{ds}^{m}C_{ds}AₑₒTₑₒ^{m}Cₑₛ^{m}CₑₛCₑₛ^{m}Cₑ (SEQ ID NO 2670), wherein:
[0333] A=an adenine nucleobase,
[0334] ^{m}C=a 5-methyl cytosine nucleobase,
[0335] G=a guanine nucleobase,
[0336] T=a thymine nucleobase,
[0337] e=a 2′-MOE sugar moiety,
[0338] d=a 2′-β-D-deoxyribosyl sugar moiety,
[0339] s=a phosphorothioate internucleoside linkage, and
[0340] o=a phosphodiester internucleoside linkage.

[0341] In certain embodiments Compound No. 1489525 is represented by the following chemical structure:

[chemical structure]

[0342] In certain embodiments, an oligomeric compound comprises the sodium salt or the potassium salt of the modified oligonucleotide represented by Structure 5.

[0343] In certain embodiments the sodium salt of Compound No. 1489525 is represented by the following chemical structure:

[chemical structure]

### 4. Compound No. 1492069

[0344] In certain embodiments. Compound No. 1492069 is characterized as a 5-10-5 MOE gapmer having a sequence (from 5′ to 3′) of TCGCCTAATTTTTCTCTCAC (SEQ ID NO 2679), wherein each of nucleosides 1-5 and 16-20 (from 5′ to 3′) are 2′-MOE nucleosides and each of nucleosides 6-15 are 2′-β-D-deoxynucleosides, wherein the internucleoside linkages between nucleosides 2 to 3, 3 to 4, 4 to 5, 16 to 17, and 17 to 18 are phosphodiester internucleoside linkages, the internucleoside linkages between nucleosides 1 to 2, 5 to 6, 6 to 7, 7 to 8, 8 to 9, 9 to 10, 10 to 11, 11 to 12, 121 to 13, 13 to 14, 14 to 15, 151 to 16, 18 to 19, and 19 to 20 are phosphorothioate internucleoside linkages, and wherein each cytosine is a 5-methyl cytosine.

[0345] In certain embodiments, Compound No. 1492069 is represented by the following chemical notation: Tₑₛ^{m}CₑₒGₑₒ^{m}Cₑₒ^{m}CₑₛT_{ds}A_{ds}A_{ds}T_{ds}T_{ds}T_{ds}T_{ds}T_{ds}^{m}C_{ds}T_{ds}^{m}CₑₒTₑₒ^{m}CₑₛAₑₛ^{m}Cₑ (SEQ ID NO 2679), wherein:
[0346] A=an adenine nucleobase,
[0347] ^{m}C=a 5-methyl cytosine nucleobase,
[0348] G=a guanine nucleobase,
[0349] T=a thymine nucleobase,
[0350] e=a 2′-MOE sugar moiety,
[0351] d=a 2′-β-D-deoxyribosyl sugar moiety,
[0352] s=a phosphorothioate internucleoside linkage, and
[0353] o=a phosphodiester internucleoside linkage.

[0354] In certain embodiments Compound No. 1492069 is represented by the following chemical structure:

[chemical structure]

[0355] In certain embodiments, an oligomeric compound comprises the sodium salt or the potassium salt of the modified oligonucleotide represented by Structure 7.

[0356] In certain embodiments the sodium salt of Compound No. 1492069 is represented by the following chemical structure:

[chemical structure]

### 5. Compound No. 1492082

[0357] In certain embodiments, Compound No. 1492082 is characterized as a 6-10-4 MOE gapmer having a sequence (from 5′ to 3′) of TTTCATATTTGTTACTTCCT (SEQ ID NO 2625), wherein each of nucleosides 1-6 and 17-20 (from 5′ to 3′) are 2′-MOE nucleosides and each of nucleosides 7-16 are 2′-β-D-deoxynucleosides, wherein the internucleoside linkages between nucleosides 2 to 3, 3 to 4, 4 to 5, 5 to 6, 6 to 7, and 17 to 18 are phosphodiester internucleoside linkages, the internucleoside linkages between nucleosides 1 to 2, 7 to 8, 8 to 9, 9 to 10, 10 to 11, 11 to 12, 12 to 13, 13 to 14, 14 to 15, 15 to 16, 16 to 17, 18 to 19, and 19 to 20 are phosphorothioate internucleoside linkages, and wherein each cytosine is a 5-methyl cytosine.

[0358] In certain embodiments, Compound No. 1492082 is represented by the following chemical notation: TₑₛTₑₒTₑₒ^{m}CₑₒAₑₒTₑₒA_{ds}T_{ds}T_{ds}T_{ds}G_{ds}T_{ds}T_{ds}A_{ds}^{m}C_{ds}T_{ds}Tₑₒ^{m}Cₑₛ^{m}CₑₛTₑ (SEQ ID NO 2625), wherein:
[0359] A=an adenine nucleobase,
[0360] ^{m}C=a 5-methyl cytosine nucleobase,
[0361] G=a guanine nucleobase,
[0362] T=a thymine nucleobase,
[0363] e=a 2′-MOE sugar moiety,
[0364] d=a 2′-β-D-deoxyribosyl sugar moiety,
[0365] s=a phosphorothioate internucleoside linkage, and
[0366] o=a phosphodiester internucleoside linkage.

[0367] In certain embodiments Compound No. 1492082 is represented by the following chemical structure:

[chemical structure]

[0368] In certain embodiments, an oligomeric compound comprises the sodium salt or the potassium salt of the modified oligonucleotide represented by Structure 9.

[0369] In certain embodiments the sodium salt of Compound No. 1492082 is represented by the following chemical structure:

[chemical structure]

### 6. Compound No. 1492131

[0370] In certain embodiments, Compound No. 1492131 is characterized as a 6-10-4 MOE gapmer having a sequence (from 5′ to 3′) of TTCGCCTAATTTTTCTCTCA (SEQ ID NO 1317), wherein each of nucleosides 1-6 and 17-20 (from 5′ to 3′) are 2′-MOE nucleosides and each of nucleosides 7-16 are 2′-β-D-deoxynucleosides, wherein the internucleoside linkages between nucleosides 2 to 3, 3 to 4, 4 to 5, 5 to 6, 6 to 7, and 17 to 18 are phosphodiester internucleoside linkages, the internucleoside linkages between nucleosides 1 to 2, 7 to 8, 8 to 9, 9 to 10, 10 to 11, 11 to 12, 12 to 13, 13 to 14, 14 to 15, 15 to 16, 16 to 17, 18 to 19, and 19 to 20 are phosphorothioate internucleoside linkages, and wherein each cytosine is a 5-methyl cytosine.

[0371] In certain embodiments, Compound No. 1492131 is represented by the following chemical notation: TₑₛTₑₒ^{m}CₑₒGₑₒ^{m}Cₑₒ^{m}CₑₒT_{ds}A_{ds}A_{ds}T_{ds}T_{ds}T_{ds}T_{ds}T_{ds}^{m}C_{ds}T_{ds}^{m}CₑₒTₑₛ^{m}CₑₛAₑ (SEQ ID NO 1317), wherein:
[0372] A=an adenine nucleobase,
[0373] ^{m}C=a 5-methyl cytosine nucleobase,
[0374] G=a guanine nucleobase,
[0375] T=a thymine nucleobase,
[0376] e=a 2′-MOE sugar moiety,
[0377] d=a 2′-β-D-deoxyribosyl sugar moiety,
[0378] s=a phosphorothioate internucleoside linkage, and
[0379] o=a phosphodiester internucleoside linkage.

[0380] In certain embodiments Compound No. 1492131 is represented by the following chemical structure:

[chemical structure]

[0381] In certain embodiments, an oligomeric compound comprises the sodium salt or the potassium salt of the modified oligonucleotide represented by Structure 11.

[0382] In certain embodiments the sodium salt of Compound No. 1492131 is represented by the following chemical structure:

[chemical structure]

### Certain Oligomeric Duplexes

[0383] Certain embodiments are directed to oligomeric duplexes comprising a first oligomeric compound and a second oligomeric compound.

[0384] In certain embodiments, an oligomeric duplex comprises:
[0385] a first oligomeric compound comprising a first modified oligonucleotide consisting of 8 to 80 linked nucleosides, wherein the nucleobase sequence of the first modified oligonucleotide is at least 80% complementary to an equal length portion within nucleobases 3964-3983, 4050-4069, 4573-4592, 4574-4593, 4600-4619, 4601-4620, 4603-4622, 4606-4625, 4619-4638, 4620-4639, 4681-4700, 4716-4735, 4717-4736, 4724-4743, 4725-4744, 4731-4750, 4732-4751, 4733-4752, 4740-4759, 4744-4763, 4771-4790, 4772-4791, 4773-4792, 4786-4805, 4788-4807, 4797-4816, 4798-4817, 4801-4820, 4808-4827, 4812-4831, 4814-4833, 4815-4834, 4823-4838, 4825-4844, 4827-4846, 4841-4860, 4846-4865, 4847-4866, 4862-4881, 4875-4894, 4888-4907, 4889-4908, 4905-4924, 4906-4925, 4942-4961, 4952-4971, 4957-4976, 4958-4977, 5035-5054, 5036-5055, 5061-5080, 5082-5101, 5083-5102, 5084-5103, 5085-5104, 5086-5101, 5086-5105, 5087-5102, 5087-5106, 5089-5104, 5089-5108, 5090-5105, 5096-5115, 5113-5132, 5114-5133, 5137-5156, 5142-5161, 5147-5162, 5166-5185, 5179-5198, 5181-5200, 5182-5201, 5183-5202, 5519-5538, 5532-5551, 5533-5552, 5537-5556, 5546-5565, 5598-5617, 5599-5618, 5600-5619, 5637-5656, 5653-5672, 5657-5676, 5669-5688, 5673-5692, 5701-5720, 5702-5721, 5703-5722, 5709-5728, 5755-5774, 5757-5776, 5761-5780, 5850-5869, 5878-5897, 5901-5920, 5902-5921, 5904-5923, 5907-5926, 5910-5929, 5915-5934, 5916-5935, 5917-5936, 5920-5939, 5921-5940, 5922-5941, 5923-5942, 5924-5943, 5931-5950, 5934-5953, 5935-5954, 5955-5974, 5984-6003, 5985-6004, 6028-6047, 6033-6052, 6035-6054, 6051-6070, 6052-6071, 6090-6109, 6111-6130, 6112-6131, 6113-6132, 6145-6164, 6170-6189, 6171-6190, 6195-6214, 6203-6222, 6204-6223, 6206-6225, 6207-6226, 6237-6256, 6264-6283, 6279-6298, 6306-6325, 6357-6376, 6361-6380, 6407-6426, 6408-6427, 6409-6428, 6412-6431, 6420-6439, 6425-6444, 6481-6500, 6482-6501, 6512-6527, 6672-6691, 6674-6689, 6710-6729, 6734-6753, 6749-6768, 6759-6778, 6760-6779, 6831-6850, 6835-6854, 6838-6857, 6916-6935, 6919-6938, 6921-6940, 6926-6945, 6935-6954, 6936-6955, 6941-6960, 6945-6964, 7211-7230, 7230-7249, 7234-7253, 7237-7256, 7307-7326, 7310-7329, 7311-7330, 7312-7331, 7315-7334, 7331-7350, 7437-7456, 7438-7457, 7443-7462, 7458-7477, 7526-7545, 7528-7547, 7543-7562, 7545-7564, 7569-7588, 7570-7589, 7585-7604, 7588-7607, 7589-7608, 7590-7609, 7591-7610, 7592-7607, 7592-7611, 7593-7608, 7593-7612, 7595-7610, 7595-7614, 7596-7611, 7602-7621, 7614-7633, 7617-7636, 7618-7637, 7619-7638, 7639-7658, 7640-7659, 7644-7663, 7649-7664, 7661-7680, 7662-7681, 7663-7682, 7665-7684, 7667-7686, 7668-7687, 7681-7700, 7683-7702, 7684-7703, 7685-7704, 7747-7766, 7771-7790, 7772-7791, 7773-7792, 7774-7793, 7775-7794, 7777-7796, 7778-7797, 7781-7800, 7782-7801, 7784-7803, 7785-7804, 7787-7806, 7788-7807, 7790-7809, 7803-7822, 7805-7824, 7806-7825, 7831-7850, 7867-7882, 7931-7950, 7957-7976, 7978-7997, 7979-7998, 7980-7999, 8144-8163, 8196-8215, 8210-8229, 8211-8230, 8226-8245, 8227-8246, 8231-8250, 8232-8251, 8261-8280, 8271-8286, 8300-8319, 8301-8320, 8310-8329, 8324-8343, 8325-8344, 8339-8358, 8343-8362, 8347-8366, 8351-8370, 8356-8375, 8357-8376, 8359-8378, 8360-8379, 8361-8380, 8362-8381, 8364-8383, 8366-8385, 8368-8387, 8369-8388, 8383-8402, 8387-8406, 8388-8407, 8391-8410, 8392-8411, 8393-8412, 8394-8413, 8398-8417, 8408-8427, 8409-8428, 8421-8440, 8425-8444, 8428-8447, 8429-8448, 8433-8452, 8443-8462, 8444-8463, 8524-8543, 8549-8568, 8550-8569, 8551-8570, 8584-8603, 8624-8643, 8626-8645, 8627-8646, 8629-8648, 8630-8649, 8631-8650, 8632-8651, 8636-8655, 8637-8656, 8652-8671, 8653-8672, 8656-8675, 8657-8676, 8659-8678, 8660-8679, 8661-8680, 8682-8701, 8698-8717, 8716-8735, 8717-8736, 8721-8740, 8722-8741, 8724-8743, 8731-8750, 8733-8752, 8748-8767, 8761-8780, 8762-8781, 8763-8782, 8764-8783, 8765-8784, 8770-8789, 8776-8795, 8777-8796, 8778-8797, 8782-8801, 8791-8806, 8791-8810, 8792-8811, 8793-8808, 8793-8812, 8794-8809, 8794-8813, 8795-8810, 8795-8814, 8807-8826, 8808-8827, 8809-8828, 8822-8841, 8831-8850, 8834-8853, 8835-8854, 8836-8855, 8857-8876, 8938-8957, 8939-8958, 8957-8972, 8980-8999, 9021-9040, 9022-9041, 9025-9044, 9026-9041, 9026-9045, 9038-9057, 9156-9175, 9164-9183, 9204-9223, 9205-9224, 9252-9271, 9253-9272, 9254-9273, 9255-9274, 9257-9276, 9319-9338, 9329-9348, 9374-9393, 9375-9394, 9376-9395, 9377-9396, 9379-9398, 9388-9407, 9393-9412, 9394-9413, 9414-9433, 9416-9435, 9419-9438, 9421-9440, 9422-9441, 9423-9442, 9425-9444, 9446-9465, 9467-9486, 9469-9488, 9499-9518, 9557-9576, 9560-9579, 9561-9580, 9563-9582,9564-9583, 9566-9585,9567-9586, 9568-9587,9569-9588, 9570-9589,9571-9590, 9578-9597, 9579-9598, 9667-9686, 9668-9687, 9676-9695, 9677-9696, 9685-9704, 9707-9726, 9713-9732, 9714-9733, 9715-9734, 9740-9759, 9741-9760, 9742-9761, 9743-9762, 9744-9763, 9748-9767, 9805-9824, 9806-9825, 9817-9836, 9896-9915, 10107-10126, 10137-10156, 10150-10169, 10270-10289, 10274-10293, 10420-10439, 10421-10440, 10628-10647, 10635-10654, 10691-10710, 10700-10719, 10702-10721, 10704-10723, 10705-10724, 10779-10798, 10780-10799, 11007-11026, 11008-11027, 11009-11028, 11016-11035, 11067-11086, 11127-11146, 11168-11187, 11170-11189, 11173-11192, 11174-11193, 11175-11194, 11288-11307, 11378-11397, 11379-11398, 11394-11413, 11411-11430, 11412-11431, 11413-11432, 11415-11434, 11417-11436, 11421-11440, 11422-11441, 11423-11442, 11424-11443, 11426-11445, 11429-11448, 11495-11514, 11496-11515, 11520-11539, 11521-11540, 11522-11541, 11548-11567, 11549-11568, 11552-11571, 11572-11591, 11574-11593, 11610-11629, 11614-11633, 11666-11685, 11667-11686, 11669-11688, 11698-11717, 11706-11725, 11752-11771, 11799-11818, 11812-11831, 11816-11835, 11817-11836, 11818-11837, 11847-11866, 11853-11872, 11855-11870, 11882-11897, 11883-11902, 11895-11914, 11896-11915, 11897-11916, 11899-11918, 11900-11919, 11901-11920, 11903-11922, 11904-11923, 11906-11925, 11910-11929, 11911-11930, 11915-11930, 11960-11979, 11964-11983, 11965-11984, 11999-12018, 12025-12044, 12046-12065, 12085-12104, 12086-12105, 12100-12119, 12148-12167, 12180-12199, 12181-12200, 12185-12204, 12187-12206, 12189-12204, 12189-12208, 12191-12210, 12212-12227, 12245-12264, 12247-12266, 12248-12267, 12250-12269, 12309-12324, 12310-12325, 12311-12326, 12313-12332, 12314-12333, 12315-12334, 12347-12366, 12350-12369, 12355-12374, 12377-12396, 12381-12400, 12385-12404, 12386-12405, 12387-12406, 12426-12445, 12427-12446, 12432-12451, 12433-12452, 12471-12490, 12472-12491, 12479-12498, 12482-12501, 12487-12506, 12498-12517, 12499-12518, 12500-12519, 12502-12521, 12503-12522, 12504-12523, 12573-12592, 12575-12594, 12576-12595, 12577-12596, 12968-12987, 12969-12988, 13011-13030, 13034-13053, 13177-13196, 13178-13197, 13213-13232, 13215-13234, 13217-13236, 13220-13239, 13337-13356, 13338-13357, 13339-13358, 13367-13386, 13413-13432, 13414-13433, 13427-13446, 13428-13447, 13429-13448, 13430-13449, 13431-13450, 13461-13480, 13490-13509, 13491-13510, 13492-13511, 13493-13512, 13496-13515, 13497-13516, 13498-13517, 13499-13518, 13500-13519, 13505-13524, 13510-13529, 13511-13530, 13532-13551, 13557-13576, 13567-13586, 13568-13587, 13569-13588, 13570-13589, 13580-13599, 13581-13600, 13582-13601, 13586-13605, 13587-13606, 13589-13608, 13590-13609, 13591-13610, 13608-13627, 13644-13663, 13645-13664, 13663-13682, 13718-13737, 13725-13744, 13727-13746, 13728-13747, 13729-13748, 13736-13755, 13737-13756, 13738-13757, 13740-13759, 13743-13762, 13754-13773, 13755-13774, 13776-13795, 13818-13837, 13819-13838, 13820-13839, 13830-13849, 13832-13851, 13845-13864, 13864-13883, 13865-13884, 13878-13897, 13911-13930, 13913-13932, 13921-13940, 13924-13943, 13954-13973, 13974-13993, 14016-14035, 14017-14036, 14018-14037, 14019-14038, 14020-14039, 14021-14040, 14023-14042, 14024-14043, 14025-14044, 14026-14045, 14052-14071, 14114-14133, 14141-14160, 14160-14179, 14161-14180, 14163-14182, 14177-14196, 14296-14315, 14300-14319, 14338-14357, 14341-14360, 14343-14362, 14454-14469, 14521-14540, 14549-14568, 14582-14601, 14583-14602, 14598-14617, 14599-14618, 14607-14626, 14613-14632, 14640-14659, 14642-14661, 14644-14663, 14721-14740, 14804-14819, 14830-14849, 14834-14853, 14845-14864, 14848-14867, 15610-15629, 15611-15630, 15626-15645, 15979-15998, 16046-16065, 16055-16074, 16056-16075, 16059-16078, 16060-16079, 16061-16080, 16062-16081, 16063-16082, 16064-16083, 16252-16271, 16253-16272, 16254-16273, 16269-16288, 16292-16311, 16293-16312, 16295-16314, 16296-16315, 16297-16316, 16323-16342, 16324-16343, 16327-16346, 16334-16353, 16350-16369, 16352-16371, 16353-16372, 16354-16373, 16356-16375, 16357-16376, 16360-16379, 16361-16380, 16363-16382, 16365-16384, 16408-16427, 16450-16469, 16463-16482, 16464-16483, 16465-16484, 16466-16485, 16472-16491, 16479-16498, 16539-16558, 16543-16558, 16559-16578, 16577-16596, 16580-16599, 16591-16610, 16650-16669, 16702-16721, 16703-16722, 16705-16724, 16727-16746, 16728-16747, 16730-16749, 16873-16892, 16875-16894, 16907-16926, 16915-16934, 16946-16965, 16947-16966, 16951-16970, 16968-16987, 16980-16999, 16983-17002, 17081-17100, 17084-17103, 17109-17128, 17134-17153, 17135-17154, 17136-17155, 17137-17156, 17195-17214, 17236-17255, 17392-17411, 17556-17575, 17557-17576, 17558-17577, 17617-17636, 17618-17637, 17627-17646, 17631-17650, 17632-17651, 17634-17653, 17649-17668, 17659-17678, 17660-17679, 17708-17727, 18056-18075, 18057-18076, 18058-18077, 18059-18078, 18061-18080, 18088-18107, 18091-18110, 18092-18111, 18093-18112, 18138-18157, 18139-18158, 18149-18168, 18151-18170, 18158-18177, 18159-18178, 18160-18179, 18161-18180, 18165-18184, 18166-18185, 18167-18186, 18171-18190, 18174-18193, 18212-18231, 18231-18250, 18232-18251, 18241-18260, 18242-18261, 18244-18263, 18248-18267, 18279-18298, 18281-18300, 18282-18301, 18312-18331, 18313-18332, 18316-18335, 18318-18337, 18324-18343, 18327-18346, 18329-18348, 18330-18349, 18344-18363, 18345-18364, 18351-18370, 18352-18371, 18367-18386, 18368-18387, 18405-18424, 18420-18439, 18425-18444, 18473-18492, 18487-18506, 18488-18507, 18530-18549, 18533-18552, 18534-18553, 18545-18564, 18564-18583, 18565-18584, 18584-18603, 18590-18609, 18606-18625, 18607-18626, 18608-18627, 18611-18630, 18628-18647, 18714-18733, 19081-19100, 19165-19184, 19173-19192, 19176-19195, 19182-19201, 19210-19229, 19212-19231, 19216-19235, 19237-19256, 19238-19257, 19239-19258, 19283-19302, 19285-19304, 19310-19329, 19311-19330, 19407-19426, 19555-19574, 19587-19606, 19588-19607, 19589-19608, 19593-19612, 19594-19613, 19640-19659, 19656-19671, 19659-19674, 19685-19704, 19687-19706, 19688-19707, 19725-19744, 19741-19760, 19762-19781, 19763-19782, 19778-19797, 19785-19804, 19786-19805, 19793-19812, 19797-19816, 19799-19818, 19800-19819, 19801-19820, 19806-19825, 19813-19832, 19814-19833, 19815-19834, 19820-19839, 19829-19844, 19838-19857, 19841-19860, 19863-19882, 19900-19919, 19922-19941, 19997-20016, 19998-20017, 19999-20018, 20000-20019, 20001-20020, 20002-20021, 20003-20022, 20004-20023, 20008-20027, 20012-20031, 20013-20032, 20014-20033, 20015-20034, 20024-20043, 20032-20051, 20033-20052, 20037-20052, 20038-20057, 20044-20059, 20046-20061, 20075-20094, 20076-20095, 20086-20105, 20087-20106, 20088-20107, 20090-20109, 20091-20110, 20102-20121, 20104-20123, 20105-20124, 20106-20125, 20107-20126, 20108-20127, 20109-20128, 20110-20129, 20111-20130, 20112-20131, 20113-20132, 20114-20133, 20135-20154, 20137-20156, 20138-20157, 20165-20184, 20166-20185, 20167-20186, 20169-20188, 20171-20190, 20172-20191, 20176-20195, 20192-20211, 20203-20222, 20207-20226, 20240-20259, 20250-20269, 20255-20270, 20300-20319, 20342-20361, 20388-20407, 20389-20408, 20390-20409, 20416-20435, 20479-20498, 20485-20504, 20487-20506, 20489-20508, 20491-20510, 20492-20511, 20493-20512, 20495-20514, 20496-20515, 20497-20516, 20498-20517, 20499-20518, 20500-20519, 20501-20520, 20503-20522, 20505-20524, 20506-20525, 20508-20527, 20517-20536, 20528-20547, 20538-20557, 20539-20558, 20587-20606, 20588-20607, 20589-20608, 20590-20609, 20591-20610, 20592-20611, 20593-20612, 20594-20613, 20595-20614, 20596-20615, 20597-20616, 20638-20657, 20639-20658, 20653-20672, 20658-20677, 20996-21015, 20999-21018, 21010-21029, 21012-21031, 21014-21033, 21034-21053, 21049-21068, 21050-21069, 21051-21070, 21053-21072, 21070-21089, 21083-21102, 21085-21104, 21106-21125, 21107-21126, 21108-21127, 21112-21131, 21113-21132, 21115-21134, 21116-21135, 21124-21143, 21125-21144, 21126-21145, 21405-21424, 21952-21971, 22057-22076, 22187-22206, 22191-22210, 22201-22220, 22202-22221, 22203-22222, 22206-22225, 22207-22226, 22217-22236, 22218-22237, 22219-22238, 22222-22241, 22223-22242, 22237-22256, 22238-22257, 22249-22268, 22288-22307, 22294-22313, 22299-22318, 22300-22319, 22308-22327, 22309-22328, 22310-22329, 22342-22361, 22347-22366, 22348-22367, 22358-22377, 22363-22382, 22364-22379, 22365-22380, 22386-22401, 22391-22410, 22411-22430, 22413-22432, 22420-22439, 22424-22443, 22425-22444, 22426-22445, 22436-22455, 22437-22456, 22438-22453, 22446-22465, 22447-22466, 22448-22467, 22449-22468, 22450-22469, 22451-22470, 22452-22471, 22453-22472, 22454-22473, 22455-22474, 22456-22475, 22457-22476, 22458-22477, 22468-22483, 22469-22488, 22470-22489, 22479-22498, 22495-22514, 22496-22515, 22521-22540, 22522-22541, 22524-22543, 22525-22544, 22526-22545, 22527-22546, 22532-22551, 22533-22552, 22541-22560, 22542-22561, 22559-22578, 22560-22579, 22565-22584, 22595-22614, 22597-22616, 22598-22617, 22599-22618, 22603-22622, 22611-22626, 22633-22652, 22638-22657, 22656-22675, 22657-22676, 22669-22688, 22673-22692, 22675-22694, 22699-22718, 22701-22720, 22723-22742, 22746-22765, 22747-22766, 22748-22767, 22768-22787, 22773-22792, 22803-22822, 22804-22823, 22805-22824, 22806-22825, 22808-22827, 22819-22838, 22832-22851, 22843-22862, 22856-22875, 22857-22876, 23134-23153, 23174-23193, 23175-23194, 23224-23243, 23231-23250, 23267-23286, 23269-23288, 23326-23345, 23327-23346, 23328-23347, 23329-23348, 23330-23349, 23336-23355, 23374-23393, 23462-23481, 23677-23696, 24115-24134, 24150-24169, 24153-24172, 24154-24173, 24197-24216, 24198-24217, 24200-24219, 24201-24220, 24236-24255, 24237-24256, 24240-24259, 24241-24260, 24243-24262, 24245-24264, 24268-24287, 24269-24288, 24287-24306, 24299-24318, 24303-24322, 24304-24323, 24305-24324, 24306-24325, 24307-24326, 24309-24328, 24310-24329, 24311-24330, 24312-24331, 24313-24332, 24314-24333, 24315-24330, 24315-24334, 24316-24335, 24318-24337, 24319-24338, 24320-24339, 24341-24360, 24353-24372, 24355-24374, 24370-24389, 24371-24390, 24388-24407, 24389-24408, 24394-24413, 24395-24414, 24454-24473, 24525-24544, 24529-24548, 24579-24598, 24580-24599, 24585-24604, 24586-24605, 24587-24606, 24588-24607, 24589-24608, 24605-24624, 24621-24640, 24622-24641, 24623-24642, 24630-24649, 24633-24652, 24646-24665, 24651-24670, 24698-24717, 24728-24747, 24729-24748, 24731-24750, 24766-24785, 24782-24801, 24783-24802, 24790-24809, 24795-24814, 24796-24815, 24797-24816, 24798-24817, 24799-24818, 24801-24820, 24812-24831, 24813-24832, 24814-24833, 24816-24835, 24818-24837, 24821-24840, 24824-24843, 24831-24850, 24832-24851, 24835-24854, 24838-24857, 24839-24858, 24840-24859, 24841-24860, 24844-24863, 24845-24864, 24846-24865, 24848-24867, 24863-24882, 24864-24883, 24865-24884, 24866-24885, 24867-24886, 24873-24892, 24878-24897, 24885-24904, 24893-24912, 24894-24913, 24913-24932, 24915-24934, 24917-24936, 24918-24937, 24921-24940, 25004-25023, 25018-25037, 25019-25038, 25021-25040, 25022-25041, 25026-25045, 25095-25114, 25096-25115, 25111-25130, 25115-25134, 25116-25135, 25117-25136, 25119-25138, 25133-25152, 25136-25155, 25137-25156, 25138-25157, 25139-25158, 25141-25160, 25143-25162, 25144-25163, 25145-25164, 25146-25165, 25148-25167, 25149-25168, 25150-25169, 25152-25171, 25153-25172, 25154-25173, 25155-25174, 25157-25176, 25158-25177, 25159-25178, 25160-25179, 25161-25180, 25162-25181, 25163-25182, 25164-25183, 25165-25184, 25168-25187, 25169-25188, 25170-25189, 25171-25190, 25174-25193, 25177-25196, 25180-25199, 25181-25200, 25182-25201, 25183-25202, 25186-25205, 25187-25206, 25188-25207, 25189-25208, 25190-25209, 25191-25210, 25196-25215, 25197-25216, 25198-25217, 25200-25219, 25203-25222, 25204-25223, 25205-25224, 25206-25225, 25207-25226, 25211-25230, 25212-25231, 25213-25232, 25214-25233, 25215-25234, 25217-25236, 25218-25237, 25219-25238, 25220-25239, 25222-25241, 25223-25242, 25224-25243, 25226-25245, 25227-25246, 25228-25247, 25230-25249, 25232-25251, 25233-25252, 25235-25254, 25238-25257, 25239-25258, 25247-25266, 25253-25272, 25255-25274, 25256-25275, 25257-25276, 25258-25277, 25261-25280, 25262-25281, 25263-25282, 25264-25283, 25265-25284, 25273-25292, 25279-25298, 25280-25299, 25289-25308, 25293-25312, 25295-25314, 25296-25315, 25297-25316, 25298-25317, 25299-25318, 25309-25328, 25318-25337, 25327-25346, 25328-25347, 25332-25351, 25334-25353, 25335-25354, 25336-25355, 25337-25356, 25338-25357, 25341-25360, 25342-25361, 25343-25362, 25344-25363, 25345-25364, 25346-25365, 25347-25366, 25350-25369, 25351-25370, 25352-25371, 25353-25372, 25385-25404, 25388-25407, 25389-25408, 25390-25409, 25391-25410, 25392-25411, 25393-25412, 25394-25413, 25402-25421, 25403-25422, 25408-25427, 25409-25428, 25413-25432, 25424-25443, 25429-25448, 25430-25449, 25477-25496, 25499-25518, 25500-25519, 25522-25541, 25525-25544, 25526-25545, 25527-25546, 25528-25547, 25529-25548, 25530-25549, 25531-25550, 25532-25551, 25533-25552, 25534-25553, 25535-25554, 25536-25555, 25542-25557, 25543-25558, 25546-25565, 25548-25567, 25550-25569, 25551-25570, 25554-25573, 25556-25575, 25558-25577, 25560-25579, 25561-25580, 25564-25583, 25565-25584, 25568-25587, 25590-25609, 25591-25610, 25606-25625, 25617-25636, 25618-25637, 25619-25638, 25620-25639, 25621-25640, 25622-25641, 25623-25642, 25624-25643, 25625-25644, 25628-25647, 25629-25648, 25630-25649, 25633-25652, 25659-25678, 25660-25679, 25661-25680, 25662-25681, 25664-25683, 25666-25685, 25690-25709, 25691-25710, 25692-25711, 25694-25713, 25695-25714, 25696-25715, 25697-25716, 25698-25717, 25699-25718, 25700-25719, 25701-25720, 25702-25721, 25703-25722, 25704-25723, 25706-25725, 25710-25729, 25712-25731, 25713-25732, 25714-25733, 25715-25734, 25728-25747, 25729-25748, 25730-25749, 25743-25762, 25744-25763, 25745-25764, 25746-25765, 25747-25766, 25748-25767, 25750-25769, 25751-25770, 25752-25771, 25753-25772, 25754-25773, 25755-25774, 25757-25776, 25758-25777, 25759-25778, 25760-25779, 25761-25780, 25762-25781, 25763-25782, 25764-25783, 25765-25784, 25766-25785, 25768-25783, 25775-25794, 25784-25803, 25792-25811, 25793-25812, 25794-25813, 25795-25814, 25799-25818, 25801-25820, 25802-25821, 25803-25822, 25805-25824, 25806-25825, 25807-25826, 25808-25827, 25821-25836, 25824-25843, 25825-25844, 25826-25845, 25841-25860, 25842-25861, 25861-25880, 25862-25881, 25865-25884, 25867-25886, 25868-25887, 25869-25888, 25872-25891, 25875-25894, 25921-25940, 25922-25941, 25923-25942, 25949-25968, 25968-25987, 25989-26008, 25990-26009, 26038-26057, 26040-26059, 26042-26061, 26052-26071, 26055-26074, 26056-26075, 26071-26090, 26087-26106, 26096-26115, 26102-26121, 26105-26124, 26563-26582, 26576-26595, 26586-26605, 26617-26636, 26621-26640, 26631-26650, 26654-26673, 26679-26698, 26680-26699, 26691-26710, 26692-26711, 26697-26716, 26699-26718, 26700-26719, 26715-26734, 26718-26737, 26740-26759, 26742-26761, 26748-26767, 26752-26771, 26758-26777, 26760-26779, 26761-26780, 26786-26805, 26796-26815, 26817-26836, 26818-26837, 26820-26839, 26824-26843, 26825-26844, 26835-26854, 26852-26871, 26868-26887, 26869-26888, 26870-26889, 26871-26890, 26875-26894, 26880-26899, 26882-26901, 26884-26903, 26885-26904, 26886-26905, 26888-26907, 26889-26908, 26891-26910, 26892-26911, 26893-26912, 26902-26921, 26903-26922, 26905-26924, 26925-26944, 26930-26949, 26936-26955, 26937-26956, 26938-26957, 26941-26960, 26942-26961, 26943-26962, 26944-26963, 26947-26966, 26950-26969, 26952-26971, 26953-26972, 26954-26973, 26956-26975, 26957-26976, 26958-26977, 26959-26978, 26976-26995, 26977-26996, 26978-26997, 26980-26999, 26981-27000, 26982-27001, 26983-27002, 26984-27003, 26985-27004, 26987-27006, 27007-27026, 27008-27027, 27009-27028, 27010-27029, 27011-27030, 27013-27032, 27014-27033, 27015-27034, 27016-27035, 27017-27036, 27018-27037, 27023-27042, 27026-27045, 27027-27046, 27037-27056, 27038-27057, 27043-27062, 27044-27063, 27045-27064, 27046-27065, 27047-27066, 27048-27067, 27067-27086, 27068-27087, 27069-27088, 27070-27089, 27075-27094, 27076-27095, 27090-27109, 27097-27116, 27105-27124, 27107-27126, 27112-27131, 27181-27200, 27192-27211, 27206-27225, 27207-27226, 27208-27227, 27212-27231, 27221-27240, 27222-27241, 27223-27242, 27244-27263, 27245-27264, 27259-27278, 27260-27279, 27274-27293, 27275-27294, 27276-27295, 27286-27305, 27287-27306, 27289-27308, 27290-27309, 27336-27355, 27341-27360, 27342-27361, 27345-27364, 27349-27368, 27388-27407, 27392-27411, 27393-27412, 27414-27433, 27416-27435, 27420-27439, 27421-27440, 27434-27453, 27435-27454, 27436-27455, 27437-27456, 27438-27457, 27439-27458, 27440-27459, 27447-27466, 27455-27474, 27456-27475, 27484-27503, 27498-27517, 27499-27518, 27500-27519, 27511-27530, 27512-27531, 27529-27548, 27543-27562, 27545-27564, 27547-27566, 27548-27567, 27549-27568, 27551-27570, 27797-27816, 27805-27824, 27806-27825, 27807-27826, 27808-27827, 27809-27828, 27810-27829, 27811-27830, 27812-27831, 27814-27833, 27815-27834, 27839-27858, 27840-27859, 27869-27888, 27870-27889, 27871-27890, 27930-27949, 27931-27950, 27934-27953, 27935-27954, 27936-27955, 27941-27960, 27965-27984, 27966-27985, 27977-27996, 27978-27997, 27988-28007, 27992-28011, 28028-28047, 28032-28051, 28033-28052, 28042-28061, 28045-28064, 28090-28109, 28092-28111, 28097-28116, 28098-28117, 28103-28122, 28116-28135, 28120-28139, 28124-28143, 28141-28160, 28145-28164, 28166-28185, 28193-28212, 28194-28213, 28195-28214, 28226-28245, 28227-28246, 28230-28249, 28253-28272, 28254-28273, 28255-28274, 28259-28278, 28263-28282, 28274-28293, 28277-28296, 28285-28304, 28294-28313, 28295-28314, 28307-28326, 28308-28327, 28310-28329, 28311-28330, 28312-28331, 28329-28348, 28358-28377, 28421-28440, 28436-28455, 28441-28460, 28443-28458, 28448-28463, 28452-28471, 28453-28468, 28482-28501, 28493-28512, 28494-28513, 28506-28525, 28534-28553, 28536-28555, 28537-28556, 28538-28557, 28541-28560, 28549-28568, 28552-28571, 28554-28573, 28555-28574, 28556-28575, 28557-28576, 28558-28577, 28559-28578, 28560-28579, 28561-28580, 28575-28594, 28576-28595, 28577-28596, 28579-28598, 28580-28599, 28581-28600, 28582-28601, 28588-28607, 28590-28609, 28591-28610, 28592-28611, 28594-28613, 28595-28614, 28596-28615, 28605-28624, 28606-28625, 28607-28626, 28609-28628, 28610-28629, 28611-28630, 28612-28631, 28621-28640, 28622-28641, 28623-28642, 28624-28643, 28625-28644, 28626-28645, 28627-28646, 28636-28655, 28637-28656, 28638-28657, 28639-28658, 28648-28667, 28814-28833, 28815-28834, 28927-28946, 28928-28947, 28929-28948, 28930-28949, 28941-28960, 28942-28961, 28957-28976, 28960-28979, 28961-28980, 28962-28981, 28976-28995, 28986-29005, 28987-29006, 28988-29007, 28989-29008, 28993-29012, 28994-29013, 28995-29014, 28996-29015, 28997-29016, 29027-29046, 29028-29047, 29029-29048, 29051-29070, 29052-29071, 29073-29092, 29076-29095, 29088-29107, 29098-29117, 29100-29119, 29116-29135, 29117-29136, 29134-29153, 29164-29183, 29165-29184, 29166-29185, 29169-29188, 29175-29194, 29176-29195, 29177-29196, 29202-29221, 29243-29262, 29325-29344, 29326-29345, 29327-29346, 29328-29347, 29335-29354, 29336-29355, 29352-29371, 29353-29372, 29354-29373, 29360-29379, 29365-29384, 29366-29385, 29368-29387, 29370-29389, 29391-29410, 29446-29465, 29447-29466, 29448-29467, 29449-29468, 29454-29473, 29455-29474, 29456-29475, 29458-29477, 29461-29480, 29462-29481, 29464-29479, 29464-29483, 29465-29484, 29466-29485, 29467-29486, 29468-29487, 29469-29488, 29470-29489, 29471-29490, 29472-29491, 29475-29494, 29476-29495, 29487-29506, 29488-29507, 29491-29510, 29496-29515, 29502-29521, 29503-29522, 29504-29523, 29505-29524, 29506-29525, 29507-29526, 29508-29527, 29509-29528, 29510-29529, 29511-29530, 29512-29531, 29515-29534, 29516-29535, 29517-29536, 29518-29537, 29519-29538, 29536-29551, 29569-29588, 29574-29593, 29673-29692, 29702-29721, 29703-29722, 29725-29744, 29726-29745, 29727-29746, 29730-29749, 29744-29763, 29745-29764, 29746-29765, 29777-29796, 29779-29798, 29788-29807, 29789-29808, 29790-29809, 29795-29814, 29796-29815, 29797-29816, 29807-29826, 29811-29830, 29819-29838, 29822-29841, 29892-29911, 29893-29912, 29918-29937, 29921-29940, 29922-29941, 29923-29942, 29924-29943, 29926-29945, 29927-29946, 29928-29943, 29930-29949, 29951-29970, 29954-29973, 29957-29976, 29959-29978, 29960-29979, 29961-29980, 29963-29982, 29964-29983, 29965-29984, 29966-29985, 29967-29986, 29968-29987, 29972-29991, 29973-29992, 29974-29993, 29976-29995, 29977-29996, 29978-29997, 29979-29998, 29980-29999, 29981-30000, 29982-30001, 29983-30002, 29984-30003, 29985-30004, 29986-30005, 29987-30006, 29988-30007, 29989-30008, 30002-30021, 30006-30025, 30018-30037, 30021-30040, 30022-30041, 30024-30043, 30029-30048, 30031-30050, 30032-30051, 30033-30052, 30035-30054, 30037-30056, 30039-30058, 30042-30061, 30059-30078, 30063-30082, 30064-30083, 30075-30094, 30076-30095, 30079-30098, 30082-30101, 30086-30105, 30088-30107, 30089-30108, 30098-30117, 30100-30119, 30109-30128, 30110-30129, 30111-30130, 30112-30131, 30113-30132, 30115-30134, 30130-30149, 30131-30150, 30132-30151, 30142-30161, 30180-30199, 30181-30200, 30182-30201, 30183-30202, 30184-30203, 30185-30204, 30187-30206, 30188-30207, 30189-30208, 30192-30211, 30199-30218, 30204-30223, 30205-30224, 30212-30231, 30252-30271, 30254-30273, 30267-30286, 30268-30287, 30269-30288, 30272-30291, 30285-30304, 30293-30312, 30294-30313, 30295-30314, 30296-30315, 30309-30328, 30345-30364, 30350-30369, 30351-30370, 30378-30397, 30379-30398, 30380-30399, 30384-30403, 30386-30405, 30387-30406, 30396-30415, 30428-30447, 30448-30467, 30458-30477, 30460-30479, 30483-30502, 30508-30527, 30509-30528, 30510-30529, 30602-30621, 30604-30623, 30777-30796, 30779-30798, 30780-30799, 30781-30800, 30782-30801, 30783-30802, 30784-30803, 30785-30804, 30790-30809, 30791-30810, 30792-30811, 30793-30812, 30794-30813, 30866-30885, 30985-31004, 30992-31011, 30994-31013, 31011-31030, 31015-31034, 31019-31038, 31041-31060, 31043-31062, 31052-31071, 31054-31073, 31060-31079, 31064-31083, 31066-31085, 31067-31086, 31070-31089, 31071-31090, 31072-31091, 31073-31092, 31074-31093, 31075-31094, 31076-31095, 31077-31096, 31078-31097, 31079-31098, 31082-31101, 31104-31123, 31107-31126, 31118-31137, 31128-31147, 31129-31148, 31130-31149, 31173-31192, 31215-31234, 31222-31241, 31224-31243, 31226-31245, 31236-31255, 31237-31256, 31241-31260, 31242-31261, 31243-31258, 31254-31273, 31255-31274, 31256-31275, 31270-31289, 31280-31299, 31282-31301, 31284-31303, 31285-31304, 31286-31305, 31288-31307, 31289-31308, 31291-31310, 31292-31311, 31293-31312, 31294-31313, 31295-31314, 31296-31315, 31313-31332, 31315-31334, 31317-31336, 31444-31463, 31456-31475, 31457-31476, 31458-31477, 31658-31677, 31659-31678, 31660-31679, 31674-31693, 31676-31695, 31677-31696, 31680-31699, 31681-31700, 31682-31701, 31683-31702, 31707-31726, 31708-31727, 31710-31729, 31719-31738, 31720-31739, 31730-31749, 31731-31750, 31735-31754, 31737-31756, 31738-31757, 31740-31759, 31741-31760, 31751-31770, 31752-31771, 31755-31774, 31758-31777, 31765-31780, 31765-31784, 31766-31785, 31792-31811, 31793-31812, 31810-31829, 31811-31830, 31812-31831, 31813-31832, 31814-31833, 31815-31834, 31816-31835, 31818-31837, 31840-31859, 31842-31861, 31850-31869, 31851-31870, 31852-31871, 31853-31872, 31854-31873, 31855-31874, 31864-31883, 31865-31884, 31883-31902, 31886-31905, 31888-31907, 31941-31960, 31946-31965, 32006-32025, 32096-32115, 32246-32265, 32259-32278, 32353-32372, 32354-32373, 32355-32374, 32356-32375, 32357-32376, 32359-32378, 32367-32386, 32401-32420, 32424-32439, 32451-32470, 32456-32475, 32457-32476, 32473-32492, 32480-32499, 32554-32573, 32661-32680, 32662-32681, 32676-32695, 32677-32696, 32728-32747, 32768-32787, 32813-32828, 32814-32833, 32825-32844, 32874-32893, 32875-32894, 32889-32908, 32947-32966, 32957-32976, 32961-32980, 32962-32981, 32967-32986, 32968-32987, 32969-32988, 32970-32989, 33037-33056, 33046-33065, 33346-33365, 33347-33366, 33356-33375, 33357-33376, 33358-33377, 33359-33378, 33361-33380, 33435-33454, 33437-33456, 33438-33457, 33439-33458, 33443-33462, 33446-33465, 33456-33475, 33475-33494, 33476-33495, 33493-33512, 33496-33515, 33497-33516, 33498-33517, 33507-33526, 33508-33527, 33511-33530, 33549-33568, 33571-33590, 33587-33606, 33588-33607, 33600-33619, 33601-33620, 33604-33623, 33605-33624, 33606-33625, 33619-33638, 33622-33641, 33625-33644, 33626-33645, 33631-33646, 33636-33655, 33650-33669, 33679-33698, 33680-33699, 33683-33702, 33684-33703, 33685-33704, 33686-33705, 33688-33707, 33706-33725, 33713-33732, 33714-33733, 33754-33773, 33756-33775, 33762-33781, 33764-33783, 33765-33784, 33769-33788, 33793-33812, 33807-33826, 33865-33884, 33867-33886, 33869-33888, 33883-33902, 33884-33903, 33922-33941, 33946-33965, 33948-33967, 33950-33969, 33951-33970, 33952-33971, 33953-33972, 33958-33977, 33959-33978, 34109-34128, 34110-34129, 34113-34132, 34117-34136, 34129-34144, 34157-34176, 34158-34177, 34159-34178, 34160-34179, 34162-34181, 34165-34184, 34166-34185, 34178-34197, 34198-34217, 34214-34233, 34223-34242, 34278-34297, 34298-34317, 34309-34328, 34327-34346, 34329-34348, 34330-34349, 34369-34388, 34383-34402, 34386-34405, 34387-34406, 34407-34426, 34409-34428, 34411-34430, 34418-34437, 34438-34457, 34440-34459, 34475-34494, 34479-34498, 34481-34500, 34485-34504, 34487-34506, 34488-34507, 34489-34508, 34490-34509, 34492-34511, 34493-34512, 34494-34513, 34502-34521, 34504-34523, 34505-34524, 34506-34525, 34515-34534, 34536-34555, 34537-34556, 34547-34566, 34548-34567, 34564-34583, 34566-34585, 34567-34586, 34568-34587, 34581-34600, 34582-34601, 34647-34666, 34648-34667, 34649-34668, 34652-34671, 34655-34674, 34656-34675, 34657-34676, 34712-34731, 34718-34737, 34719-34738, 35016-35035, 35017-35036, 35018-35037, 35019-35038, 35021-35040, 35023-35042, 35057-35076, 35058-35077, 35059-35078, 35069-35088, 35096-35115, 35097-35116, 35100-35119, 35101-35120, 35102-35121, 35104-35123, 35267-35286, 35289-35308, 35336-35355, 35337-35356, 35343-35362, 35344-35363, 35345-35364, 35349-35368, 35350-35369, 35351-35370, 35381-35400, 35382-35401, 35385-35404, 35391-35406, 35396-35411, 35401-35420, 35402-35421, 35423-35442, 35424-35443, 35425-35444, 35435-35454, 35438-35457, 35442-35461, 35445-35464, 35446-35465, 35495-35510, 35502-35517, 35509-35524, 35511-35530, 35512-35531, 35514-35533, 35515-35534, 35516-35535, 35520-35535, 35533-35552, 35543-35562, 35547-35566, 35570-35589, 35613-35632, 35615-35634, 35619-35638, 35620-35639, 35621-35640, 35631-35650, 35639-35658, 35640-35659, 35642-35661, 35643-35662, 35644-35663, 35652-35671, 35653-35672, 35654-35673, 35655-35674, 35657-35676, 35664-35683, 35667-35686, 35668-35687, 35675-35690, 35681-35700, 35683-35702, 35685-35704, 35705-35724, 35706-35725, 35709-35728, 35711-35730, 35712-35731, 35719-35738, 35720-35739, 35736-35755, 35745-35764, 35746-35765, 35747-35766, 35748-35767, 35753-35772, 35764-35783, 35765-35784, 35769-35788, 35783-35802, 35784-35803, 35788-35807, 35789-35808, 35799-35818, 35802-35821, 35809-35828, 35810-35829, 35811-35830, 35812-35831, 35815-35834, 35816-35835, 35817-35836, 35818-35837, 35819-35838, 35820-35839, 35830-35849, 35844-35859, 35877-35896, 35879-35898, 35881-35900, 35882-35901, 35914-35933, 35987-36006, 35988-36007, 35992-36011, 35994-36013, 35995-36014, 35996-36015, 35998-36017, 36007-36026, 36021-36040, 36022-36041, 36023-36042, 36065-36084, 36068-36087, 36069-36088, 36109-36128, 36112-36131, 36113-36132, 36116-36135, 36121-36140, 36124-36143, 36125-36144, 36181-36200, 36182-36201, 36186-36205, 36248-36267, 36251-36270, 36262-36281, 36280-36299, 36281-36300, 36286-36305, 36287-36306, 36288-36307, 36289-36308, 36292-36311, 36313-36332, 36426-36445, 36833-36852, 36959-36978, 36997-37012, 37002-37021, 37018-37037, 37019-37038, 37020-37039, 37029-37048, 37031-37050, 37032-37051, 37033-37052, 37034-37053, 37035-37054, 37036-37055, 37070-37089, 37071-37090, 37074-37093, 37075-37094, 37076-37095, 37086-37105, 37087-37106, 37088-37107, 37089-37108, 37093-37112, 37125-37144, 37135-37154, 37213-37232, 37224-37243, 37241-37260, 37266-37285, 37267-37286, 37280-37299, 37281-37300, 37291-37310, 37292-37311, 37308-37327, 37318-37337, 37340-37355, 37341-37356, 37343-37358, 37353-37372, 37355-37370, 37356-37375, 37367-37386, 37368-37387, 37369-37388, 37370-37389, 37375-37394, 37390-37409, 37391-37410, 37392-37407, 37392-37411, 37401-37420, 37402-37421, 37406-37425, 37407-37426, 37416-37435, 37420-37439, 37425-37444, 37436-37455, 37480-37499, 37481-37500, 37482-37501, 37483-37502, 37529-37548, 37530-37549, 37531-37550, 37562-37581, 37614-37633, 37617-37636, 37634-37649, 37637-37656, 37660-37679, 37665-37684, 37676-37695, 37680-37699, 37886-37905, 37888-37907, 37889-37908, 37890-37909, 37923-37942, 37924-37943, 37968-37983, 38042-38061, 38058-38073, 38060-38079, 38095-38114, 38113-38132, 38114-38133, 38115-38134, 38116-38135, 38121-38140, 38139-38158, 38140-38159, 38145-38164, 38154-38173, 38155-38174, 38156-38175, 38157-38176, 38159-38178, 38168-38187, 38171-38190, 38172-38191, 38175-38194, 38176-38195, 38177-38196, 38181-38196, 38204-38223, 38205-38224, 38272-38291, 38273-38292, 38277-38296, 38279-38298, 38295-38314, 38318-38337, 38319-38338, 38321-38340, 38322-38341, 38326-38345, 38328-38347, 38361-38380, 38362-38381, 38363-38382, 38367-38386, 38375-38394, 38417-38436, 38468-38487, 38469-38488, 38470-38489, 38516-38535, 38537-38556, 38540-38559, 38542-38561, 38552-38571, 38553-38572, 38557-38576, 38583-38602, 38620-38639, 38623-38642, 38633-38652, 38659-38678, 38698-38717, 38720-38739, 38743-38762, 38745-38764, 38747-38766, 38783-38802, 38785-38804, 38788-38807, 38789-38808, 38790-38809, 38791-38810, 38792-38811, 38829-38848, 38830-38845, 38831-38850, 39011-39026, or 39014-39029 of SEQ ID NO: 1 or at least 80% complementary to an equal length portion within nucleobases 216-235, 218-237, 220-239, 521-540, 670-689, 1119-1138, 1283-1302, 1284-1303, 1287-1306, 1288-1307, 1580-1599, 1581-1600 of SEQ ID NO: 2; and
[0386] a second oligomeric compound comprising a second modified oligonucleotide consisting of 8 to 80 linked nucleosides, wherein the nucleobase sequence of the second modified oligonucleotide comprises a complementary region of at least 8 nucleobases that is at least 90% complementary to an equal length portion of the first modified oligonucleotide. In certain embodiments, the nucleobase sequence of the first modified oligonucleotide is at least 85%, at least 90%, at least 95%, or 100% complementary to an equal length portion of the IFNAR1 nucleic acid.

[0387] In certain embodiments, an oligomeric duplex comprises:
[0388] a first oligomeric compound comprising a first modified oligonucleotide consisting of 8 to 80 linked nucleosides, wherein the nucleobase sequence of the first modified oligonucleotide is at least 80% complementary to an equal length portion within nucleobases 5084-5133, 19997-20061, 20076-20133, 20528-2061120616, 22294-22329, 22453-22476, 2259722595-22626, 25530-25565, 25606-25652, 25710-25767, 25768-25827, 28421-28468, 29924-29949, 29968-30021, 31072-31096, 31792-31837, 32353-32386, or 35016-35042 of SEQ ID NO: 1; and
[0389] a second oligomeric compound comprising a second modified oligonucleotide consisting of 8 to 80 linked nucleosides, wherein the nucleobase sequence of the second modified oligonucleotide comprises a complementary region of at least 8 nucleobases that is at least 90% complementary to an equal length portion of the first modified oligonucleotide. In certain embodiments, the nucleobase sequence of the first modified oligonucleotide is at least 85%, at least 90%, at least 95%, or 100% complementary to an equal length portion of the IFNAR1 nucleic acid.

[0390] In certain embodiments, an oligomeric duplex comprises:
[0391] a first oligomeric compound comprising a first modified oligonucleotide consisting of 8 to 80 linked nucleosides wherein the nucleobase sequence of the first modified oligonucleotide comprises at least 8, at least 9, at least 10, at least 11, at least 12, at least 13, at least 14, at least 15, or at least 16 contiguous nucleobases of the nucleobase sequence of any of SEQ ID NOs 12-2687, wherein each thymine is replaced by uracil; and
[0392] a second oligomeric compound comprising a second modified oligonucleotide consisting of 8 to 80 linked nucleosides wherein the nucleobase sequence of the second modified oligonucleotide comprises a complementary region of at least 8 nucleobases that is at least 90% complementary to an equal length portion of the first modified oligonucleotide. In certain embodiments, the nucleobase sequence of the first modified oligonucleotide is at least 85%, at least 90%, at least 95%, or 100% complementary to an equal length portion of the IFNAR1 nucleic acid.

[0393] In certain embodiments, the first oligomeric compound is an antisense compound. In certain embodiments, the first modified oligonucleotide is an antisense oligonucleotide. In certain embodiments, the second oligomeric compound is a sense compound. In certain embodiments, the second modified oligonucleotide is a sense oligonucleotide.

[0394] In certain embodiments, an oligomeric duplex comprises:
[0395] a first oligomeric compound comprising a first modified oligonucleotide consisting of 16 to 80 linked nucleosides wherein the nucleobase sequence of the first modified oligonucleotide comprises the nucleobase sequence of any of SEQ ID NOs 12-89, wherein each thymine is replaced by uracil; and
[0396] a second oligomeric compound comprising a second modified oligonucleotide consisting of 16 to 80 linked nucleosides wherein the nucleobase sequence of the second modified oligonucleotide comprises a complementary region of at least 16 nucleobases that is at least 90% complementary to an equal length portion of the first modified oligonucleotide.

[0397] In certain embodiments, the first oligomeric compound is an antisense compound. In certain embodiments, the first modified oligonucleotide is an antisense oligonucleotide. In certain embodiments, the second oligomeric compound is a sense compound. In certain embodiments, the second modified oligonucleotide is a sense oligonucleotide.

[0398] In any of the oligomeric duplexes described herein, at least one nucleoside of the first modified oligonucleotide and/or the second modified oligonucleotide can comprise a modified sugar moiety. Examples of suitable modified sugar moieties include, but are not limited to, a bicyclic sugar moiety, such as a bicyclic sugar moiety comprising a 2′-4′ bridge selected from —O—CH2- and —O—CH(CH3)-, and a non-bicyclic sugar moiety, such as a 2′-MOE sugar moiety, a 2′-F sugar moiety, a 2′-OMe sugar moiety, or a 2′-NMA sugar moiety. In certain embodiments, at least 80%, at least 90%, or 100% of the nucleosides of the first modified oligonucleotide and/or the second modified oligonucleotide comprises a modified sugar moiety selected from 2′-F sugar moiety and 2′-OMe sugar moiety.

[0399] In any of the oligomeric duplexes described herein, at least one nucleoside of the first modified oligonucleotide and/or the second modified oligonucleotide can comprise a sugar surrogate. Examples of suitable sugar surrogates include, but are not limited to, morpholino, peptide nucleic acid (PNA), glycol nucleic acid (GNA), and unlocked nucleic acid (UNA). In certain embodiments, at least one nucleoside of the first modified oligonucleotide comprises a sugar surrogate, which can be a GNA.

[0400] In any of the oligomeric duplexes described herein, at least one internucleoside linkage of the first modified oligonucleotide and/or the second modified oligonucleotide can comprise a modified internucleoside linkage. In certain embodiments, the modified internucleoside linkage is a phosphorothioate internucleoside linkage. In certain embodiments, at least one of the first, second, or third internucleoside linkages from the 5′ end and/or the 3′ end of the first modified oligonucleotide comprises a phosphorothioate linkage. In certain embodiments, at least one of the first, second, or third internucleoside linkages from the 5′ end and/or the 3′ end of the second modified oligonucleotide comprises a phosphorothioate linkage.

[0401] In any of the oligomeric duplexes described herein, at least one internucleoside linkage of the first modified oligonucleotide and/or the second modified oligonucleotide can comprise a phosphodiester internucleoside linkage.

[0402] In any of the oligomeric duplexes described herein, each internucleoside linkage of the first modified oligonucleotide and/or the second modified oligonucleotide can be independently selected from a phosphodiester internucleoside linkage or a phosphorothioate internucleoside linkage.

[0403] In any of the oligomeric duplexes described herein, at least one nucleobase of the first modified oligonucleotide and/or the second modified oligonucleotide can be a modified nucleobase. In certain embodiments, the modified nucleobase is 5-methyl cytosine.

[0404] In any of the oligomeric duplexes described herein, the first modified oligonucleotide can comprise a stabilized phosphate group attached to the 5′ position of the 5′-most nucleoside. In certain embodiments, the stabilized 5′-phosphate group comprises a cyclopropyl phosphonate or an (E)-vinyl phosphonate.

[0405] In any of the oligomeric duplexes described herein, the first modified oligonucleotide can comprise a conjugate group. In certain embodiments, the conjugate group comprises a conjugate linker and a conjugate moiety. In certain embodiments, the conjugate group is attached to the first modified oligonucleotide at the 5′-end of the first modified oligonucleotide. In certain embodiments, the conjugate group is attached to the first modified oligonucleotide at the 3′-end of the modified oligonucleotide. In certain embodiments, the conjugate group comprises N-acetyl galactosamine. In certain embodiments, the conjugate group comprises a cell-targeting moiety having an affinity for transferrin receptor (TfR), also known as TfR1 and CD71. In certain embodiments, the conjugate group comprises an anti-TfR1 antibody or fragment thereof. In certain embodiments, the conjugate group comprises a protein or peptide capable of binding TfR1. In certain embodiments, the conjugate group comprises an aptamer capable of binding TfR1. In certain embodiments, the conjugate group may comprise a conjugate moiety selected from any of a C22 alkyl, C20 alkyl, C16 alkyl, C10 alkyl, C21 alkyl, C19 alkyl, C18 alkyl, C17 alkyl, C15 alkyl, C14 alkyl, C13 alkyl. C12 alkyl, C11 alkyl, C9 alkyl, C8 alkyl, C7 alkyl, C6 alkyl, C5 alkyl, C22 alkenyl, C20 alkenyl, C16 alkenyl, C10 alkenyl, C21 alkenyl, C19 alkenyl, C18 alkenyl, C17 alkenyl, C15 alkenyl, C14 alkenyl, C13 alkenyl, C12 alkenyl, C11 alkenyl, C9 alkenyl, C8 alkenyl, C7 alkenyl, C6 alkenyl, or C5 alkenyl. In certain embodiments, the conjugate group may comprise a conjugate moiety selected from any of a C22 alkyl, C20 alkyl, C16 alkyl, C10 alkyl, C21 alkyl, C19 alkyl, C18 alkyl, C17 alkyl, C15 alkyl, C14 alkyl, C13 alkyl, C12 alkyl, C11 alkyl, C9 alkyl, C8 alkyl, C7 alkyl, C6 alkyl, or C5 alkyl, where the alkyl chain has one or more unsaturated bonds.

[0406] In any of the oligomeric duplexes described herein, the second modified oligonucleotide can comprise a conjugate group. In certain embodiments, the conjugate group comprises a conjugate linker and a conjugate moiety. In certain embodiments, the conjugate group is attached to the second modified oligonucleotide at the 5′-end of the second modified oligonucleotide. In certain embodiments, the conjugate group is attached to the second modified oligonucleotide at the 3′-end of the modified oligonucleotide. In certain embodiments, the conjugate group comprises N-acetyl galactosamine. In certain embodiments, the conjugate group comprises a cell-targeting moiety having an affinity for transferrin receptor (TfR), also known as TfR1 and CD71. In certain embodiments, the conjugate group comprises an anti-TfR1 antibody or fragment thereof. In certain embodiments, the conjugate group comprises a protein or peptide capable of binding TfR1. In certain embodiments, the conjugate group comprises an aptamer capable of binding TfR1. In certain embodiments, the conjugate group may comprise a conjugate moiety selected from any of a C22 alkyl, C20 alkyl, C16 alkyl, C10 alkyl, C21 alkyl, C19 alkyl, C18 alkyl, C17 alkyl, C15 alkyl, C14 alkyl, C13 alkyl, C12 alkyl, C11 alkyl, C9 alkyl, C8 alkyl, C7 alkyl, C6 alkyl, C5 alkyl, C22 alkenyl, C20 alkenyl, C16 alkenyl, C10 alkenyl, C21 alkenyl, C19 alkenyl, C18 alkenyl, C17 alkenyl, C15 alkenyl, C14 alkenyl, C13 alkenyl, C12 alkenyl, C11 alkenyl, C9 alkenyl, C8 alkenyl, C7 alkenyl, C6 alkenyl, or C5 alkenyl. In certain embodiments, the conjugate group may comprise a conjugate moiety selected from any of a C22 alkyl, C20 alkyl, C16 alkyl, C10 alkyl, C21 alkyl, C19 alkyl, C18 alkyl, C17 alkyl, C15 alkyl, C14 alkyl, C13 alkyl, C12 alkyl, C11 alkyl, C9 alkyl, C8 alkyl, C7 alkyl, C6 alkyl, or C5 alkyl, where the alkyl chain has one or more unsaturated bonds.

[0407] In certain embodiments, an antisense agent comprises an antisense compound comprising an oligomeric compound or an oligomeric duplex described herein. In certain embodiments, an antisense agent, which can comprise an oligomeric compound or an oligomeric duplex described herein, is an RNAi agent capable of reducing the amount of IFNAR1 nucleic acid through the activation of RISC/Ago2.

[0408] Certain embodiments provide an oligomeric agent comprising two or more oligomeric duplexes. In certain embodiments, an oligomeric agent comprises two or more of any of the oligomeric duplexes described herein. In certain embodiments, an oligomeric agent comprises two or more of the same oligomeric duplex, which can be any of the oligomeric duplexes described herein. In certain embodiments, the two or more oligomeric duplexes are linked together. In certain embodiments, the two or more oligomeric duplexes are covalently linked together. In certain embodiments, the second modified oligonucleotides of two or more oligomeric duplexes are covalently linked together. In certain embodiments, the second modified oligonucleotides of two or more oligomeric duplexes are covalently linked together at their 3′ ends. In certain embodiments, the two or more oligomeric duplexes are covalently linked together by a glycol linker, such as a tetraethylene glycol linker. Certain such compounds are described in, e.g., Alterman, et al., Nature Biotech., 37:844-894, 2019.

### I. Certain Oligonucleotides

[0409] In certain embodiments, provided herein are oligomeric compounds comprising oligonucleotides, which consist of linked nucleosides. Oligonucleotides may be unmodified oligonucleotides (RNA or DNA) or may be modified oligonucleotides. Modified oligonucleotides comprise at least one modification relative to unmodified RNA or DNA. That is, modified oligonucleotides comprise at least one modified nucleoside (comprising a modified sugar moiety and/or a modified nucleobase) and/or at least one modified internucleoside linkage. Certain modified nucleosides and modified internucleoside linkages suitable for use in modified oligonucleotides are described below.

### A. Certain Modified Nucleosides

[0410] Modified nucleosides comprise a modified sugar moiety or a modified nucleobase or both a modified sugar moiety and a modified nucleobase. In certain embodiments, modified nucleosides comprising the following modified sugar moieties and/or the following modified nucleobases may be incorporated into modified oligonucleotides.

### 1. Certain Sugar Moieties

[0411] In certain embodiments, modified sugar moieties are non-bicyclic modified sugar moieties. In certain embodiments, modified sugar moieties are bicyclic or tricyclic sugar moieties. In certain embodiments, modified sugar moieties are sugar surrogates. Such sugar surrogates may comprise one or more substitutions corresponding to those of other types of modified sugar moieties.

[0412] In certain embodiments, modified sugar moieties are non-bicyclic modified sugar moieties comprising a furanosyl ring with one or more substituent groups none of which bridges two atoms of the furanosyl ring to form a bicyclic structure. Such non bridging substituents may be at any position of the furanosyl, including but not limited to substituents at the 2′, 3′, 4′, and/or 5′ positions. In certain embodiments one or more non-bridging substituent of non-bicyclic modified sugar moieties is branched. Examples of 2′-substituent groups suitable for non-bicyclic modified sugar moieties include but are not limited to: 2′-F, 2′-OCH₃ (“OMe” or “O-methyl”), and 2′-O(CH₂)₂OCH₃ (“MOE” or “O-methoxyethyl”). In certain embodiments, 2′-substituent groups are selected from among: halo, allyl, amino, azido, SH, CN, OCN, CF₃, OCF₃, O—C₁-C₁₀ alkoxy, O—C₁-C₁₀ substituted alkoxy, O—C₁-C₁₀ alkyl, O—C₁-C₁₀ substituted alkyl, S-alkyl, N(Rₘ)-alkyl, O-alkenyl, S-alkenyl, N(Rₘ)-alkenyl, O-alkynyl, S-alkynyl, N(Rₘ)-alkynyl, O-alkylenyl-O-alkyl, alkynyl, alkaryl, aralkyl, O-alkaryl, O-aralkyl, O(CH₂)₂SCH₃, O(CH₂)₂ON(Rₘ)(Rₙ) or OCH₂C(═O)—N(Rₘ)(Rₙ), where each Rₘ and Rₙ is, independently, H, an amino protecting group, or substituted or unsubstituted C₁-C₁₀ alkyl, —O(CH₂)₂ON(CH₃)₂ (“DMAOE”), 2′-O(CH₂)₂O(CH₂)₂N(CH₃)₂ (“DMAEOE”), and the 2′-substituent groups described in Cook et al., U.S. Pat. No. 6,531,584; Cook et al., U.S. Pat. No. 5,859,221; and Cook et al., U.S. Pat. No. 6,005,087. Certain embodiments of these 2′-substituent groups can be further substituted with one or more substituent groups independently selected from among: hydroxyl, amino, alkoxy, carboxy, benzyl, phenyl, nitro (NO₂), thiol, thioalkoxy, thioalkyl, halogen, alkyl, aryl, alkenyl and alkynyl. In certain embodiments, non-bicyclic modified sugar moieties comprise a substituent group at the 3′-position. Examples of substituent groups suitable for the 3′-position of modified sugar moieties include but are not limited to alkoxy (e.g., methoxy), alkyl (e.g., methyl, ethyl). In certain embodiments, non-bicyclic modified sugar moieties comprise a substituent group at the 4′-position. Examples of 4′-substituent groups suitable for non-bicyclic modified sugar moieties include but are not limited to alkoxy (e.g., methoxy), alkyl, and those described in Manoharan et al., WO 2015/106128. Examples of 5′-substituent groups suitable for non-bicyclic modified sugar moieties include but are not limited to: 5′-methyl (R or S). 5′-vinyl, ethyl, and 5′-methoxy. In certain embodiments, non-bicyclic modified sugar moieties comprise more than one non-bridging sugar substituent, for example, 2′-F-5′-methyl sugar moieties and the modified sugar moieties and modified nucleosides described in Migawa et al., WO 2008/101157 and Rajeev et al., US2013/0203836).

[0413] In certain embodiments, a 2′-substituted non-bicyclic modified nucleoside comprises a sugar moiety comprising a non-bridging 2′-substituent group selected from: F, NH₂, N₃, OCF₃, OCH₃, O(CH₂)₃NH₂, CH₂CH═CH₂, OCH₂CH═CH₂, O(CH₂)₂OCH₃, O(CH₂)₂SCH₃, O(CH₂)₂ON(Rₘ)(Rₙ), O(CH₂)₂O(CH₂)₂N(CH₃)₂, and N-substituted acetamide (OCH₂C(═O)—N(Rₘ)(Rₙ)), where each Rₘ and Rₙ is, independently, H, an amino protecting group, or a substituted or unsubstituted C₁-C₁₀ alkyl.

[0414] In certain embodiments, a 2′-substituted nucleoside non-bicyclic modified nucleoside comprises a sugar moiety comprising a non-bridging 2′-substituent group selected from: F, OCF₃, OCH₃, O(CH₂)₂OCH₃ (MOE), O(CH₂)₂SCH₃, O(CH₂)₂ON(CH₃)₂, O(CH₂)₂O(CH₂)₂N(CH₃)₂, O(CH₂)₂ON(CH₃)₂ (“DMAOE”), OCH₂OCH₂N(CH₂)₂ (“DMAEOE”), and OCH₂C(═O)—N(H)CH₃ (“NMA”).

[0415] In certain embodiments, a 2′-substituted non-bicyclic modified nucleoside comprises a sugar moiety comprising a non-bridging 2′-substituent group selected from: F, OCH₃, and O(CH₂)₂OCH₃.

[0416] In certain embodiments, modified furanosyl sugar moieties and nucleosides incorporating such modified furanosyl sugar moieties are further defined by isomeric configuration. For example, a 2′-deoxyfuranosyl sugar moiety may be in seven isomeric configurations other than the naturally occurring β-D-deoxyribosyl configuration. Such modified sugar moieties are described in, e.g., WO 2019/157531, incorporated by reference herein. A 2′-modified sugar moiety has an additional stereocenter at the 2′-position relative to a 2′-deoxyfuranosyl sugar moiety; therefore, such sugar moieties have a total of sixteen possible isomeric configurations. 2′-modified sugar moieties described herein are in the β-D-ribosyl isomeric configuration unless otherwise specified.

[0417] In naturally occurring nucleic acids, sugars are linked to one another 3′ to 5′. In certain embodiments, oligonucleotides include one or more nucleoside or sugar moiety linked at an alternative position, for example at the 2′ position or inverted 5′ to 3′. For example, where the linkage is at the 2′ position, the 2′-substituent groups may instead be at the 3′-position.

[0418] Certain modified sugar moieties comprise a substituent that bridges two atoms of the furanosyl ring to form a second ring, resulting in a bicyclic sugar moiety. Nucleosides comprising such bicyclic sugar moieties have been referred to as bicyclic nucleosides (BNAs), locked nucleosides, or conformationally restricted nucleotides (CRN). Certain such compounds are described in US Patent Publication No. 2013/0190383; and PCT publication WO 2013/036868. In certain such embodiments, the bicyclic sugar moiety comprises a bridge between the 4′ and the 2′ furanose ring atoms. n certain such embodiments, the furanose ring is a ribose ring. Examples of such 4′ to 2′ bridging sugar substituents include but are not limited to: 4′-CH₂-2′, 4′-(CH₂)₂-2′, 4′-(CH₂)₃-2′, 4′-CH₂—O-2′ (“LNA”), 4′-CH₂—S-2′, 4′-(CH₂)₂—O-2′ (“ENA”), 4′-CH(CH₃)—O-2′ (referred to as “constrained ethyl” or “cEt” when in the S configuration), 4′-CH₂—O—CH₂-2′, 4′-CH₂—N(R)-2′, 4′-CH(CH₂OCH₃)—O-2′ (“constrained MOE” or “cMOE”) and analogs thereof (see, e.g., Seth et al., U.S. Pat. No. 7,399,845, Bhat et al., U.S. Pat. No. 7,569,686, Swayze et al., U.S. Pat. No. 7,741,457, and Swayze et al., U.S. Pat. No. 8,022,193), 4′-C(CH₃)(CH₃)—O-2′ and analogs thereof (see, e.g., Seth et al., U.S. Pat. No. 8,278,283), 4′-CH₂—N(OCH₃)-2′ and analogs thereof (see, e.g., Prakash et al., U.S. Pat. No. 8,278,425), 4′-CH₂—O—N(CH3)-2′ (see, e.g., Allerson et al., U.S. Pat. No. 7,696,345 and Allerson et al., U.S. Pat. No. 8,124,745), 4′-CH₂—C(H)(CH₃)-2′ (see, e.g., Zhou, et al., J. Org. Chem., 2009, 74, 118-134), 4′-CH₂—C(═CH₂)-2′ and analogs thereof (see e.g., Seth et al., U.S. Pat. No. 8,278,426), 4′-C(RₐR_{b})—N(R)—O-2′, 4′-C(RₐR_{b})—O—N(R)-2′, 4′—CH₂—O—N(R)-2′, and 4′-CH₂—N(R)—O-2′, wherein each R, Rₐ, and R_{b} is, independently, H, a protecting group, or C₁-C₁₂ alkyl (see, e.g. Imanishi et al., U.S. Pat. No. 7,427,672).

[0419] In certain embodiments, such 4′ to 2′ bridges independently comprise from 1 to 4 linked groups independently selected from: —[C(Ra)(Rb)]n-, —[C(Ra)(Rb)]n-O—, C(Ra)═C(Rb)—, C(Ra)=N—, C(═NRa)—, —C(═O)—, —C(═S)—, —O—, —Si(Ra)2-, —S(═O)x-, and N(Ra)—;
[0420] wherein:
[0421] x is 0, 1, or 2;
[0422] n is 1, 2, 3, or 4;
[0423] each Ra and Rb is, independently, H, a protecting group, hydroxyl, C1-C12 alkyl, substituted C1-C12 alkyl, C2-C12 alkenyl, substituted C2-C12 alkenyl, C2-C12 alkynyl, substituted C2-C12 alkynyl, C5-C20 aryl, substituted C5-C20 aryl, heterocycle radical, substituted heterocycle radical, heteroaryl, substituted heteroaryl, C5-C7 alicyclic radical, substituted C5-C7 alicyclic radical, halogen, OJ1, NJ1J2, SJ1, N3, COOJ1, acyl (C(═O)—H), substituted acyl, CN, sulfonyl (S(═O)2-J1), or sulfoxyl (S(═O)-J1); and each J1 and J2 is, independently, H, C1-C12 alkyl, substituted C1-C12 alkyl, C2-C12 alkenyl, substituted C2-C12 alkenyl, C2-C12 alkynyl, substituted C2-C12 alkynyl, C5-C20 aryl, substituted C5-C20 aryl, acyl (C(═O)—H), substituted acyl, a heterocycle radical, a substituted heterocycle radical, C1-C12 aminoalkyl, substituted C1-C12 aminoalkyl, or a protecting group.

[0424] Additional bicyclic sugar moieties are known in the art, see, for example: Freier et al., Nucleic Acids Research, 1997, 25(22), 4429-4443, Albaek et al., J. Org. Chem., 2006, 71, 7731-7740, Singh et al., Chem. Commun., 1998, 4, 455-456; Koshkin et al., Tetrahedron, 1998, 54, 3607-3630; Wahlestedt et al., Proc. Natl. Acad. Sci. U.S.A, 2000, 97, 5633-5638; Kumar et al., Bioorg. Med. Chem. Lett., 1998, 8, 2219-2222; Singh et al., J. Org. Chem., 1998, 63, 10035-10039; Srivastava et al., J. Am. Chem. Soc., 2007, 129, 8362-8379; Elayadi et al., Curr. Opinion Invens. Drugs, 2001, 2, 558-561; Braasch et al., Chem. Biol., 2001, 8, 1-7; Orum et al., Curr. Opinion Mol. Ther., 2001, 3, 239-243; Wengel et al., U.S. Pat. No. 7,053,207, Imanishi et al., U.S. Pat. No. 6,268,490, Imanishi et al. U.S. Pat. No. 6,770,748, Imanishi et al., U.S. RE44,779; Wengel et al., U.S. Pat. No. 6,794,499, Wengel et al., U.S. Pat. No. 6,670,461; Wengel et al., U.S. Pat. No. 7,034,133, Wengel et al., U.S. Pat. No. 8,080,644; Wengel et al., U.S. Pat. No. 8,034,909; Wengel et al., U.S. Pat. No. 8,153,365; Wengel et al., U.S. Pat. No. 7,572,582; and Ramasamy et al., U.S. Pat. No. 6,525,191, Torsten et al., WO 2004/106356, Wengel et al., WO 1999/014226; Seth et al., WO 2007/134181; Seth et al., U.S. Pat. No. 7,547,684; Seth et al., U.S. Pat. No. 7,666,854; Seth et al., U.S. Pat. No. 8,088,746; Seth et al., U.S. Pat. No. 7,750,131; Seth et al., U.S. Pat. No. 8,030,467; Seth et al., U.S. Pat. No. 8,268,980; Seth et al., U.S. Pat. No. 8,546,556; Seth et al., U.S. Pat. No. 8,530,640; Migawa et al., U.S. Pat. No. 9,012,421; Seth et al., U.S. Pat. No. 8,501,805; Allerson et al., US2008/0039618; and Migawa et al., US2015/0191727. In certain embodiments, bicyclic sugar moieties and nucleosides incorporating such bicyclic sugar moieties are further defined by isomeric configuration. For example, an LNA nucleoside (described herein) may be in the α-L configuration or in the β-D configuration.

[chemical structure]

[0425] α-L-methyleneoxy (4′-CH₂—O-2′) or α-L-LNA bicyclic nucleosides have been incorporated into oligonucleotides that showed antisense activity (Frieden et al., Nucleic Acids Research, 2003, 21, 6365-6372). The addition of locked nucleic acids to siRNAs has been shown to increase siRNA stability in serum, and to reduce off-target effects (Elmen, J. et al., (2005) Nucleic Acids Research 33(1):439-447; Mook, OR. et al., (2007) Mal Cane Ther 6(3):833-843; Grunweller, A. et al., (2003) Nucleic Acids Research 31(12):3185-3193). Herein, general descriptions of bicyclic nucleosides include both isomeric configurations. When the positions of specific bicyclic nucleosides (e.g., LNA or cEt) are identified in exemplified embodiments herein, they are in the $-D configuration, unless otherwise specified.

[0426] In certain embodiments, modified sugar moieties comprise one or more non-bridging sugar substituent and one or more bridging sugar substituent (e.g., 5′-substituted and 4′-2′ bridged sugars).

[0427] In certain embodiments, modified sugar moieties are sugar surrogates. In certain such embodiments, the oxygen atom of the sugar moiety is replaced, e.g., with a sulfur, carbon, or nitrogen atom. In certain such embodiments, such modified sugar moieties also comprise bridging and/or non-bridging substituents as described herein. For example, certain sugar surrogates comprise a 4′-sulfur atom and a substitution at the 2-position (see, e.g., Bhat et al., U.S. Pat. No. 7,875,733 and Bhat et al., U.S. Pat. No. 7,939,677) and/or the 5′ position.

[0428] In certain embodiments, sugar surrogates comprise rings having other than 5 atoms. For example, in certain embodiments, a sugar surrogate comprises a six-membered tetrahydropyran (“THP”). Such tetrahydropyrans may be further modified or substituted. Nucleosides comprising such modified tetrahydropyrans include but are not limited to hexitol nucleic acid (“HNA”), anitol nucleic acid (“ANA”), manitol nucleic acid (“MNA”) (see, e.g., Leumann, CJ. Bioorg. & Med. Chem. 2002, 10, 841-854), fluoro HNA:

[chemical structure]

(“F-HNA”, see e.g. Swayze et al., U.S. Pat. No. 8,088,904; Swayze et al., U.S. Pat. No. 8,440,803; Swayze et al., U.S. Pat. No. 8,796,437; and Swayze et al., U.S. Pat. No. 9,005,906; F-HNA can also be referred to as a F-THP or 3-fluoro tetrahydropyran), and nucleosides comprising additional modified THP compounds having the formula:

[chemical structure]

[0429] wherein, independently, for each of said modified THP nucleoside:
[0430] Bx is a nucleobase moiety;
[0431] T₃ and T₄ are each, independently, an internucleoside linking group linking the modified THP nucleoside to the remainder of an oligonucleotide or one of T₃ and T₄ is an internucleoside linking group linking the modified THP nucleoside to the remainder of an oligonucleotide and the other of T₃ and T₄ is H, a hydroxyl protecting group, a conjugate group or a 5′ or 3-terminal group;
[0432] q₁, q₂, q₃, q₄, q₅, q₆ and q are each, independently, H, C₁-C₆ alkyl, substituted C₁-C₆ alkyl, C₂-C₆ alkenyl, substituted C₂-C₆ alkenyl, C₂-C₆ alkynyl, or substituted C₂-C₆ alkynyl; and
[0433] each of R₁ and R₂ is independently selected from among: hydrogen, halogen, substituted or unsubstituted alkoxy, NJ₁J₂, SJ₁, N₃, OC(═X)J₁, OC(═X)NJ₁J₂, NJ₃C(═X)NJ₁J₂, and CN, wherein X is O, S or NJ₁, and each J₁, J₂, and J₃ is, independently, H or C₁-C₆ alkyl.

[0434] In certain embodiments, modified THP nucleosides are provided wherein q₁, q₂, q₃, q₄, q₅, q₆ and q₇ are each H. In certain embodiments, at least one of q₁, q₂, q₃, q₄, q₅, q₆ and q₇ is other than H. In certain embodiments, at least one of q₁, q₂, q₃, q₄, q₅, q₆ and q₇ is methyl. In certain embodiments, modified THP nucleosides are provided wherein one of R₁ and R₂ is F. In certain embodiments, R₁ is F and R₂ is H, in certain embodiments, R₁ is methoxy and R₂ is H, and in certain embodiments, R₁ is methoxyethoxy and R₂ is H.

[0435] In certain embodiments, sugar surrogates comprise rings having more than 5 atoms and more than one heteroatom. For example, nucleosides comprising morpholino sugar moieties and their use in oligonucleotides have been reported (see, e.g., Braasch et al., Biochemistry. 2002, 41, 4503-4510 and Summerton et al., U.S. Pat. No. 5,698,685; Summerton et al., U.S. Pat. No. 5,166,315; Summerton et al., U.S. Pat. No. 5,185,444; and Summerton et al., U.S. Pat. No. 5,034,506). As used here, the term “morpholino” means a sugar surrogate having the following structure:

[chemical structure]

[0436] In certain embodiments, morpholinos may be modified, for example by adding or altering various substituent groups from the above morpholino structure. Such sugar surrogates are referred to herein as “modified morpholinos.”

[0437] In certain embodiments, sugar surrogates comprise acyclic moieties. Examples of nucleosides and oligonucleotides comprising such acyclic sugar surrogates include but are not limited to peptide nucleic acid (“PNA”), acyclic butyl nucleic acid (see, e.g., Kumar et al., Org. Biomol. Chem., 2013, 11, 5853-5865), and nucleosides and oligonucleotides described in Manoharan et al., WO2011/133876. In certain embodiments, sugar surrogates comprise acyclic moieties. Examples of nucleosides and oligonucleotides comprising such acyclic sugar surrogates include, but are not limited to, peptide nucleic acid (“PNA”), acyclic butyl nucleic acid (see, e.g., Kumar et al., Org. Biomol. Chem., 2013, 11, 5853-5865), and nucleosides and oligonucleotides described in Manoharan et al., US 2013/130378. Representative U.S. patents that teach the preparation of PNA compounds include, but are not limited to, U.S. Pat. Nos. 5,539,082; 5,714,331; and 5,719,262. Additional PNA compounds suitable for use in the oligonucleotides of the invention are described in, for example, in Nielsen et al., Science, 1991, 254, 1497-1500.

[0438] In certain embodiments, sugar surrogates are the “unlocked” sugar structure of UNA (unlocked nucleic acid) nucleosides. UNA is an unlocked acyclic nucleic acid, wherein any of the bonds of the sugar has been removed, forming an unlocked sugar surrogate. Representative U.S. publications that teach the preparation of UNA include, but are not limited to, U.S. Pat. No. 8,314,227; and US Patent Publication Nos. 2013/0096289; 2013/0011922; and 2011/0313020, the entire contents of each of which are hereby incorporated herein by reference.

[0439] In certain embodiments, sugar surrogates are the glycerol as found in GNA (glycol nucleic acid) nucleosides as depicted below:

[chemical structure]

[0440] where Bx represents any nucleobase.

[0441] Many other bicyclic and tricyclic sugar and sugar surrogates are known in the art that can be used in modified nucleosides.

### 2. Certain Modified Nucleobases

[0442] In certain embodiments, modified oligonucleotides comprise one or more nucleosides comprising an unmodified nucleobase. In certain embodiments, modified oligonucleotides comprise one or more nucleosides comprising a modified nucleobase. In certain embodiments, modified oligonucleotides comprise one or more nucleosides that does not comprise a nucleobase, referred to as an abasic nucleoside. In certain embodiments, modified oligonucleotides comprise one or more inosine nucleosides (i.e., nucleosides comprising a hypoxanthine nucleobase).

[0443] In certain embodiments, modified nucleobases are selected from: 5-substituted pyrimidines, 6-azapyrimidines, alkyl or alkynyl substituted pyrimidines, alkyl substituted purines, and N-2, N-6 and 0-6 substituted purines. In certain embodiments, modified nucleobases are selected from: 5-methylcytosine, 2-aminopropyladenine, 5-hydroxymethyl cytosine, xanthine, hypoxanthine, 2-aminoadenine, 6-N-methylguanine, 6-N-methyladenine, 2-propyladenine, 2-thiouracil, 2-thiothymine and 2-thiocytosine, 5-propynyl (—C═C—CH₃) uracil. 5-propynylcytosine, 6-azouracil, 6-azocytosine, 6-azothymine, 5-ribosyluracil (pseudouracil), 4-thiouracil, 8-halo, 8-amino, 8-thiol, 8-thioalkyl, 8-hydroxyl, 8-aza and other 8-substituted purines, 5-halo, particularly 5-bromo, 5-trifluoromethyl, 5-halouracil, and 5-halocytosine, 7-methylguanine, 7-methyladenine, 2-F-adenine, 2-aminoadenine, 7-deazaguanine, 7-deazaadenine, 3-deazaguanine, 3-deazaadenine, 6-N-benzoyladenine, 2-N-isobutyrylguanine, 4-N-benzoylcytosine, 4-N-benzoyluracil, 5-methyl 4-N-benzoylcytosine, 5-methyl 4-N-benzoyluracil, universal bases, hydrophobic bases, promiscuous bases, size-expanded bases, and fluorinated bases. Further modified nucleobases include tricyclic pyrimidines, such as 1,3-diazaphenoxazine-2-one, 1,3-diazaphenothiazine-2-one and 9-(2-aminoethoxy)-1,3-diazaphenoxazine-2-one (G-clamp). Modified nucleobases may also include those in which the purine or pyrimidine base is replaced with other heterocycles, for example 7-deaza-adenine, 7-deazaguanosine, 2-aminopyridine and 2-pyridone. Further nucleobases include those disclosed in Merigan et al., U.S. Pat. No. 3,687,808, those disclosed in The Concise Encyclopedia Of Polymer Science And Engineering, Kroschwitz, J. I., Ed., John Wiley & Sons, 1990, 858-859; Englisch et al., Angewandte Chemie, International Edition, 1991, 30, 613; Sanghvi, Y. S., Chapter 15, Antisense Research and Applications, Crooke, S. T. and Lebleu, B., Eds., CRC Press, 1993, 273-288; and those disclosed in Chapters 6 and 15, Antisense Drug Technology, Crooke S. T., Ed., CRC Press, 2008, 163-166 and 442-443.

[0444] Publications that teach the preparation of certain of the above noted modified nucleobases as well as other modified nucleobases include without limitation, Manoharan et al., US2003/0158403; Manoharan et al., US2003/0175906; Dinh et al., U.S. Pat. No. 4,845,205; Spielvogel et al., U.S. Pat. No. 5,130,302; Rogers et al., U.S. Pat. No. 5,134,066; Bischofberger et al., U.S. Pat. No. 5,175,273; Urdea et al., U.S. Pat. No. 5,367,066; Benner et al., U.S. Pat. No. 5,432,272; Matteucci et al., U.S. Pat. No. 5,434,257; Gmeiner et al., U.S. Pat. No. 5,457,187; Cook et al., U.S. Pat. No. 5,459,255; Froehler et al., U.S. Pat. No. 5,484,908; Matteucci et al., U.S. Pat. No. 5,502,177; Hawkins et al., U.S. Pat. No. 5,525,711; Haralambidis et al., U.S. Pat. No. 5,552,540; Cook et al., U.S. Pat. No. 5,587,469; Froehler et al., U.S. Pat. No. 5,594,121; Switzer et al., U.S. Pat. No. 5,596,091; Cook et al., U.S. Pat. No. 5,614,617; Froehler et al., U.S. Pat. No. 5,645,985; Cook et al., U.S. Pat. No. 5,681,941; Cook et al., U.S. Pat. No. 5,811,534; Cook et al., U.S. Pat. No. 5,750,692; Cook et al., U.S. Pat. No. 5,948,903; Cook et al., U.S. Pat. No. 5,587,470; Cook et al., U.S. Pat. No. 5,457,191; Matteucci et al., U.S. Pat. No. 5,763,588; Froehler et al., U.S. Pat. No. 5,830,653; Cook et al., U.S. Pat. No. 5,808,027; Cook et al., U.S. Pat. No. 6,166,199; and Matteucci et al., U.S. Pat. No. 6,005,096.

### 3. Certain Modified Internucleoside Linkages

[0445] The naturally occurring internucleoside linkage of RNA and DNA is a 3′ to 5′ phosphodiester linkage. In certain embodiments, nucleosides of modified oligonucleotides may be linked together using one or more modified internucleoside linkages. The two main classes of internucleoside linking groups are defined by the presence or absence of a phosphorus atom. Representative phosphorus-containing internucleoside linkages include but are not limited to phosphates, which contain a phosphodiester bond (“P═O”) (also referred to as unmodified or naturally occurring linkages), phosphotriesters, methylphosphonates, phosphoramidates, phosphorothioates (“P═S”), and phosphorodithioates (“HS-P═S”). Representative non-phosphorus containing internucleoside linking groups include but are not limited to methylenemethylimino (—CH₂—N(CH₃)—O—CH₂—), thiodiester, thionocarbamate (—O—C(═O)(NH)—S—), siloxane (—O—SiH₂—O—), and N,N′-dimethylhydrazine (—CH₂—N(CH₃)—N(CH₃)—). Modified internucleoside linkages, compared to naturally occurring phosphate linkages, can be used to alter, typically increase, nuclease resistance of the oligonucleotide. In certain embodiments, internucleoside linkages having a chiral atom can be prepared as a racemic mixture, or as separate enantiomers. Methods of preparation of phosphorous-containing and non-phosphorous-containing internucleoside linkages are well known to those skilled in the art.

[0446] In certain embodiments, a modified internucleoside linkage is any of those described in WO 2021/030778, incorporated by reference herein. In certain embodiments, a modified internucleoside linkage comprises the formula:

[chemical structure]

[0447] wherein independently for each internucleoside linking group of the modified oligonucleotide:
   [0448] X is selected from O or S;
   [0449] R₁ is selected from H, a C₁-C₆ alkyl, and a substituted C₁-C₆ alkyl; and
   [0450] T is selected from SO₂R₂, C(═O)R₃, and P(═O)R₄R₅, wherein:
   [0451] R₂ is selected from an aryl, a substituted aryl, a heterocycle, a substituted heterocycle, an aromatic heterocycle, a substituted aromatic heterocycle, a diazole, a substituted diazole, a C₁-C₆ alkoxy, a C₁-C₆ alkyl, a C₁-C₆ alkenyl, a C₁-C₆ alkynyl, a substituted C₁-C₆ alkyl, a substituted C₁-C₆ alkenyl, a substituted C₁-C₆ alkynyl, and a conjugate group;
   [0452] R₃ is selected from an aryl, a substituted aryl, CH₃, N(CH₃)₂, OCH₃, and a conjugate group;
   [0453] R₄ is selected from OCH₃, OH, a C₁-C₆ alkyl, a substituted C₁-C₆ alkyl, and a conjugate group; and
   [0454] R₅ is selected from OCH₃, OH, a C₁-C₆ alkyl, and a substituted C₁-C₆ alkyl.

[0455] In certain embodiments, a modified internucleoside linkage comprises a mesyl phosphoramidate linking group having a formula:

[chemical structure]

[0456] In certain embodiments, a mesyl phosphoramidate internucleoside linkage may comprise a chiral center. In certain embodiments, modified oligonucleotides comprising (Rp) and/or (Sp) mesyl phosphoramidates comprise one or more of the following formulas, respectively, wherein “B” indicates a nucleobase:

[chemical structure]

[0457] Representative internucleoside linkages having a chiral center include but are not limited to alkylphosphonates, mesyl phosphoramidates, and phosphorothioates. Modified oligonucleotides comprising internucleoside linkages having a chiral center can be prepared as populations of modified oligonucleotides comprising stereorandom internucleoside linkages, or as populations of modified oligonucleotides comprising phosphorothioate or other linkages containing chiral centers in particular stereochemical configurations. In certain embodiments, populations of modified oligonucleotides comprise phosphorothioate internucleoside linkages wherein all of the phosphorothioate internucleoside linkages are stereorandom. In certain embodiments, populations of modified oligonucleotides comprise mesyl phosphoramidate internucleoside linkages wherein all of the mesyl phosphoramidate internucleoside linkages are stereorandom. Such modified oligonucleotides can be generated using synthetic methods that result in random selection of the stereochemical configuration of each phosphorothioate or mesyl phosphoramidate linkage. Nonetheless, each individual phosphorothioate or mesyl phosphoramidate of each individual oligonucleotide molecule has a defined stereoconfiguration. In certain embodiments, populations of modified oligonucleotides are enriched for modified oligonucleotides comprising one or more particular phosphorothioate or mesyl phosphoramidate internucleoside linkages in a particular, independently selected stereochemical configuration. In certain embodiments, the particular configuration of the particular phosphorothioate or mesyl phosphoramidate linkage is present in at least 65% of the molecules in the population. In certain embodiments, the particular configuration of the particular phosphorothioate or mesyl phosphoramidate linkage is present in at least 70% of the molecules in the population. In certain embodiments, the particular configuration of the particular phosphorothioate or mesyl phosphoramidate linkage is present in at least 80% of the molecules in the population. In certain embodiments, the particular configuration of the particular phosphorothioate or mesyl phosphoramidate linkage is present in at least 90% of the molecules in the population. In certain embodiments, the particular configuration of the particular phosphorothioate or mesyl phosphoramidate linkage is present in at least 99% of the molecules in the population. Such chirally enriched populations of modified oligonucleotides can be generated using synthetic methods known in the art. e.g., methods described in Oka et al., JACS 125, 8307 (2003), Wan et al. Nuc. Acid. Res. 42, 13456 (2014), and WO 20171015555. In certain embodiments, a population of modified oligonucleotides is enriched for modified oligonucleotides having at least one indicated phosphorothioate or mesyl phosphoramidate in the (Sp) configuration. In certain embodiments, a population of modified oligonucleotides is enriched for modified oligonucleotides having at least one phosphorothioate or mesyl phosphoramidate in the (Rp) configuration. In certain embodiments, modified oligonucleotides comprising (Rp) and/or (Sp) phosphorothioates comprise one or more of the following formulas, respectively, wherein “B” indicates a nucleobase:

[chemical structure]

[0458] Unless otherwise indicated, chiral internucleoside linkages of modified oligonucleotides described herein can be stereorandom or in a particular stereochemical configuration.

[0459] Neutral internucleoside linkages include, without limitation, phosphotriesters, methylphosphonates, MMI (3′-CH₂—N(CH₃)—O-5′), amide-3 (3′-CH₂—C(═O)—N(H)-5′), amide-4 (3′-CH₂—N(H)—C(═O)-5′), formacetal (3′-O—CH₂—O-5′), methoxypropyl (MOP), and thioformacetal (3′-S—CH₂—O-5′). Further neutral internucleoside linkages include nonionic linkages comprising siloxane (dialkylsiloxane), carboxylate ester, carboxamide, sulfide, sulfonate ester and amides (See for example: Carbohydrate Modifications in Antisense Research; Y. S. Sanghvi and P. D. Cook, Eds., ACS Symposium Series 580; Chapters 3 and 4, 40-65). Further neutral internucleoside linkages include nonionic linkages comprising mixed N, O, S and CH₂ component parts.

[0460] In certain embodiments, modified oligonucleotides comprise one or more inverted nucleoside, as shown below:

[chemical structure]

[0461] wherein each Bx independently represents any nucleobase.

[0462] In certain embodiments, an inverted nucleoside is terminal (i.e., the last nucleoside on one end of an oligonucleotide) and so only one internucleoside linkage depicted above will be present. In certain such embodiments, additional features (such as a conjugate group) may be attached to the inverted nucleoside. Such terminal inverted nucleosides can be attached to either or both ends of an oligonucleotide.

[0463] In certain embodiments, such groups lack a nucleobase and are referred to herein as inverted sugar moieties. In certain embodiments, an inverted sugar moiety is terminal (i.e., attached to the last nucleoside on one end of an oligonucleotide) and so only one internucleoside linkage described above will be present. In certain such embodiments, additional features (such as a conjugate group) may be attached to the inverted sugar moiety. Such terminal inverted sugar moieties can be attached to either or both ends of an oligonucleotide.

[0464] In certain embodiments, nucleic acids can be linked 2′ to 5′ rather than the standard 3′ to 5′ linkage. Such a linkage is illustrated below.

[chemical structure]

[0465] wherein each Bx represents any nucleobase.

### B. Certain Motifs

[0466] In certain embodiments, modified oligonucleotides comprise one or more modified nucleosides comprising a modified sugar moiety. In certain embodiments, modified oligonucleotides comprise one or more modified nucleosides comprising a modified nucleobase. In certain embodiments, modified oligonucleotides comprise one or more modified internucleoside linkage. In such embodiments, the modified, unmodified, and differently modified sugar moieties, nucleobases, and/or internucleoside linkages of a modified oligonucleotide define a pattern or motif. In certain embodiments, the patterns of sugar moieties, nucleobases, and internucleoside linkages are each independent of one another. Thus, a modified oligonucleotide may be described by its sugar motif, nucleobase motif and/or internucleoside linkage motif (as used herein, nucleobase motif describes the modifications to the nucleobases independent of the sequence of nucleobases).

### 1. Certain Sugar Motifs

[0467] In certain embodiments, oligonucleotides comprise one or more type of modified sugar and/or unmodified sugar moiety arranged along the oligonucleotide or region thereof in a defined pattern or sugar motif. In certain instances, such sugar motifs include but are not limited to any of the sugar modifications discussed herein.

### Gapmer Oligonucleotides

[0468] In certain embodiments, modified oligonucleotides comprise or consist of a region having a gapmer motif, which is defined by two external regions or “wings” and a central or internal region or “gap.” The three regions of a gapmer motif (the 5′-wing, the gap, and the 3′-wing) form a contiguous sequence of nucleosides wherein at least some of the sugar moieties of the nucleosides of each of the wings differ from at least some of the sugar moieties of the nucleosides of the gap. Specifically, at least the sugar moieties of the nucleosides of each wing that are closest to the gap (the 3′-most nucleoside of the 5′-wing and the 5′-most nucleoside of the 3′-wing) differ from the sugar moiety of the neighboring gap nucleosides, thus defining the boundary between the wings and the gap (i.e., the wing/gap junction). In certain embodiments, the sugar moieties within the gap are the same as one another. In certain embodiments, the gap includes one or more nucleoside having a sugar moiety that differs from the sugar moiety of one or more other nucleosides of the gap. In certain embodiments, the sugar motifs of the two wings are the same as one another (symmetric gapmer). In certain embodiments, the sugar motif of the 5′-wing differs from the sugar motif of the 3′-wing (asymmetric gapmer).

[0469] In certain embodiments, the wings of a gapmer comprise 1-6 nucleosides. In certain embodiments, each nucleoside of each wing of a gapmer comprises a modified sugar moiety. In certain embodiments, at least one nucleoside of each wing of a gapmer comprises a modified sugar moiety. In certain embodiments, at least two nucleosides of each wing of a gapmer comprises a modified sugar moiety. In certain embodiments, at least three nucleosides of each wing of a gapmer comprises a modified sugar moiety. In certain embodiments, at least four nucleosides of each wing of a gapmer comprises a modified sugar moiety.

[0470] In certain embodiments, the gap of a gapmer comprises 7-12 nucleosides. In certain embodiments, each nucleoside of the gap of a gapmer comprises a 2′-β-D-deoxyribosyl sugar moiety. In certain embodiments, at least one nucleoside of the gap of a gapmer comprises a modified sugar moiety.

[0471] In certain embodiments, the gapmer is a deoxy gapmer. In certain embodiments, the nucleosides on the gap side of each wing/gap junction comprise 2′-deoxyribosyl sugar moieties and the nucleosides on the wing sides of each wing/gap junction comprise modified sugar moieties. In certain embodiments, each nucleoside of the gap comprises a 2′-β-D-deoxyribosyl sugar moiety. In certain embodiments, each nucleoside of each wing of a gapmer comprises a modified sugar moiety. In certain embodiments, at least one nucleoside of the gap of a gapmer comprises a modified sugar moiety. In certain embodiments, one nucleoside of the gap comprises a modified sugar moiety and each remaining nucleoside of the gap comprises a 2′-deoxyribosyl sugar moiety. In certain embodiments, at least one nucleoside of the gap of a gapmer comprises a 2′-OMe sugar moiety.

[0472] Herein, the lengths (number of nucleosides) of the three regions of a gapmer may be provided using the notation [# of nucleosides in the 5′-wing]-[# of nucleosides in the gap]-[# of nucleosides in the 3′-wing]. Thus, a 3-10-3 gapmer consists of 3 linked nucleosides in each wing and 10 linked nucleosides in the gap. Where such nomenclature is followed by a specific modification, that modification is the modification in each sugar moiety of each wing and the gap nucleosides comprise 2′-β-D-deoxyribosyl sugar moieties. Thus, a 5-10-5 MOE gapmer consists of 5 linked 2′-MOE nucleosides in the 5′-wing, 10 linked 2′-β-D-deoxynucleosides in the gap, and 5 linked 2′-MOE nucleosides in the 3′-wing. A 6-10-4 MOE gapmer consists of 6 linked 2′-MOE nucleosides in the 5′-wing, 10 linked 2′-β-D-deoxynucleosides in the gap, and 4 linked 2′-MOE nucleosides in the 3′-wing. A 3-10-3 cEt gapmer consists of 3 linked cEt nucleosides in the 5′-wing, 10 linked 2′-β-D-deoxynucleosides in the gap, and 3 linked cEt nucleosides in the 3′-wing.

[0473] In certain embodiments, modified oligonucleotides have a sugar motif selected from 5′ to 3′: eeeeeddddddddddeeeee; wherein each “d” represents a 2′-β-D-deoxyribosyl sugar moiety, and each “e” represents a 2′-MOE sugar moiety.

[0474] In certain embodiments, modified oligonucleotides have a sugar motif selected from 5′ to 3′: eeeeeeddddddddddeeee; wherein each “d” represents a 2′-β-D-deoxyribosyl sugar moiety, and each “e” represents a 2′-MOE sugar moiety.

[0475] In certain embodiments, modified oligonucleotides have the sugar motif from 5′ to 3′: kkkddddddddddkkk; wherein each “d” represents a 2′-β-D-deoxyribosyl sugar moiety, and each “k” represents a cEt modified sugar moiety.

[0476] In certain embodiments, modified oligonucleotides have the sugar motif from 5′ to 3′: eeeeedyddddddddeeeee; wherein each “d” represents a 2′-β-D-deoxyribosyl sugar moiety, each “e” represents a 2′-MOE sugar moiety, and each “y” represents a 2′-OMe sugar moiety.

[0477] In certain embodiments, modified oligonucleotides have the sugar motif from 5′ to 3′: eeeeeedyddddddddeeee; wherein each “d” represents a 2′-β-D-deoxyribosyl sugar moiety, each “e” represents a 2′-MOE sugar moiety, and each “y” represents a 2′-OMe sugar moiety.

[0478] In certain embodiments, modified oligonucleotides have the sugar motif from 5′ to 3′: kkkdyddddddddkkk; wherein each “d” represents a 2′-β-D-deoxyribosyl sugar moiety, each “k” represents a cEt modified sugar moiety, and each “y” represents a 2′-OMe sugar moiety.

### 2. Certain Nucleobase Motifs

[0479] In certain embodiments, oligonucleotides comprise modified and/or unmodified nucleobases arranged along the oligonucleotide or region thereof in a defined pattern or motif. In certain embodiments, each nucleobase is modified. In certain embodiments, none of the nucleobases are modified. In certain embodiments, each purine or each pyrimidine is modified. In certain embodiments, each adenine is modified. In certain embodiments, each guanine is modified. In certain embodiments, each thymine is modified. In certain embodiments, each uracil is modified. In certain embodiments, each cytosine is modified. In certain embodiments, some or all of the cytosine nucleobases in a modified oligonucleotide are 5-methyl cytosines. In certain embodiments, all of the cytosine nucleobases are 5-methyl cytosines and all of the other nucleobases of the modified oligonucleotide are unmodified nucleobases.

[0480] In certain embodiments, modified oligonucleotides comprise a block of modified nucleobases. In certain such embodiments, the block is at the 3′-end of the oligonucleotide. In certain embodiments the block is within 3 nucleosides of the 3′-end of the oligonucleotide. In certain embodiments, the block is at the 5′-end of the oligonucleotide. In certain embodiments the block is within 3 nucleosides of the 5′-end of the oligonucleotide.

[0481] In certain embodiments, oligonucleotides having a gapmer motif comprise a nucleoside comprising a modified nucleobase. In certain such embodiments, one nucleoside comprising a modified nucleobase is in the central gap of an oligonucleotide having a gapmer motif. In certain such embodiments, the sugar moiety of said nucleoside is a 2′-deoxyribosyl sugar moiety. In certain embodiments, the modified nucleobase is selected from: a 2-thiopyrimidine and a 5-propynepyrimidine.

### 3. Certain Internucleoside Linkage Motifs

[0482] In certain embodiments, oligonucleotides comprise modified and/or unmodified internucleoside linkages arranged along the oligonucleotide or region thereof in a defined pattern or motif. In certain embodiments, each internucleoside linking group is a phosphodiester internucleoside linkage (P═O). In certain embodiments, each internucleoside linking group of a modified oligonucleotide is a phosphorothioate internucleoside linkage (P═S). In certain embodiments, each internucleoside linkage of a modified oligonucleotide is independently selected from a phosphorothioate internucleoside linkage and phosphodiester internucleoside linkage. In certain embodiments, each phosphorothioate internucleoside linkage is independently selected from a stereorandom phosphorothioate, a (Sp) phosphorothioate, and a (Rp) phosphorothioate.

[0483] In certain embodiments, the sugar motif of a modified oligonucleotide is a gapmer and the internucleoside linkages within the gap are all modified. In certain such embodiments, some or all of the internucleoside linkages in the wings are unmodified phosphodiester internucleoside linkages. In certain embodiments, the terminal internucleoside linkages are modified. In certain embodiments, the sugar motif of a modified oligonucleotide is a gapmer, and the internucleoside linkage motif comprises at least one phosphodiester internucleoside linkage in at least one wing, wherein the at least one phosphodiester linkage is not a terminal internucleoside linkage, and the remaining internucleoside linkages are phosphorothioate internucleoside linkages. In certain such embodiments, all of the phosphorothioate linkages are stereorandom. In certain embodiments, all of the phosphorothioate linkages in the wings are (Sp) phosphorothioates, and the gap comprises at least one Sp, Sp, Rp motif. In certain embodiments, populations of modified oligonucleotides are enriched for modified oligonucleotides comprising such internucleoside linkage motifs.

[0484] In certain embodiments, modified oligonucleotides have an internucleoside linkage motif of (5′ to 3′): sssssssssssssss, wherein each “s” represents a phosphorothioate internucleoside linkage. In certain embodiments, modified oligonucleotides have an internucleoside linkage motif of (5′ to 3′): sosoossssssssssooss, wherein each “s” represents a phosphorothioate internucleoside linkage and each “o” represents a phosphodiester internucleoside linkage. In certain embodiments, modified oligonucleotides have an internucleoside linkage motif of (5′ to 3′): sossoossssssssssoss, wherein each “s” represents a phosphorothioate internucleoside linkage and each “o” represents a phosphodiester internucleoside linkage. In certain embodiments, modified oligonucleotides have an internucleoside linkage motif of (5′ to 3′): sossossssssssssooss, wherein each “s” represents a phosphorothioate internucleoside linkage and each “o” represents a phosphodiester internucleoside linkage. In certain embodiments, modified oligonucleotides have an internucleoside linkage motif of (5′ to 3′): sosssssssssssssooss, wherein each “s” represents a phosphorothioate internucleoside linkage and each “o” represents a phosphodiester internucleoside linkage. In certain embodiments, modified oligonucleotides have an internucleoside linkage motif of (5′ to 3′): sosooossssssssssoss, wherein each “s” represents a phosphorothioate internucleoside linkage and each “o” represents a phosphodiester internucleoside linkage. In certain embodiments, modified oligonucleotides have an internucleoside linkage motif of (5′ to 3′): sosssossssssssssoss, wherein each “s” represents a phosphorothioate internucleoside linkage and each “o” represents a phosphodiester internucleoside linkage. In certain embodiments, modified oligonucleotides have an internucleoside linkage motif of (5′ to 3′): sooosssssssssssooss, wherein each “s” represents a phosphorothioate internucleoside linkage and each “o” represents a phosphodiester internucleoside linkage. In certain embodiments, modified oligonucleotides have an internucleoside linkage motif of (5′ to 3′): sooosossssssssssoss, wherein each “s” represents a phosphorothioate internucleoside linkage and each “o” represents a phosphodiester internucleoside linkage. In certain embodiments, modified oligonucleotides have an internucleoside linkage motif of (5′ to 3′): sooossssssssssssoss, wherein each “s” represents a phosphorothioate internucleoside linkage and each “o” represents a phosphodiester internucleoside linkage. In certain embodiments, modified oligonucleotides have an internucleoside linkage motif of (5′ to 3′): soooossssssssssooss, wherein each “s” represents a phosphorothioate internucleoside linkage and each “o” represents a phosphodiester internucleoside linkage. In certain embodiments, modified oligonucleotides have an internucleoside linkage motif of (5′ to 3′): soooosssssssssssoss, wherein each “s” represents a phosphorothioate internucleoside linkage and each “o” represents a phosphodiester internucleoside linkage. In certain embodiments, modified oligonucleotides have an internucleoside linkage motif of (5′ to 3′): sooooossssssssssoss, wherein each “s” represents a phosphorothioate internucleoside linkage and each “o” represents a phosphodiester internucleoside linkage. In certain embodiments, modified oligonucleotides have an internucleoside linkage motif of (5′ to 3′): soosossssssssssooss, wherein each “s” represents a phosphorothioate internucleoside linkage and each “o” represents a phosphodiester internucleoside linkage. In certain embodiments, modified oligonucleotides have an internucleoside linkage motif of (5′ to 3′): soossssssssssssooss, wherein each “s” represents a phosphorothioate internucleoside linkage and each “o” represents a phosphodiester internucleoside linkage. In certain embodiments, modified oligonucleotides have an internucleoside linkage motif of (5′ to 3′): soosoossssssssssoss, wherein each “s” represents a phosphorothioate internucleoside linkage and each “o” represents a phosphodiester internucleoside linkage. In certain embodiments, modified oligonucleotides have an internucleoside linkage motif of (5′ to 3′): soossossssssssssoss, wherein each “s” represents a phosphorothioate internucleoside linkage and each “o” represents a phosphodiester internucleoside linkage. In certain embodiments, modified oligonucleotides have an internucleoside linkage motif of (5′ to 3′): soosssssssssssssoss, wherein each “s” represents a phosphorothioate internucleoside linkage and each “o” represents a phosphodiester internucleoside linkage.

[0485] In certain embodiments, modified oligonucleotides have an internucleoside linkage motif of (5′ to 3′): ssooossssssssssooss, wherein each “s” represents a phosphorothioate internucleoside linkage and each “o” represents a phosphodiester internucleoside linkage. In certain embodiments, modified oligonucleotides have an internucleoside linkage motif of (5′ to 3′): sssoossssssssssooss, wherein each “s” represents a phosphorothioate internucleoside linkage and each “o” represents a phosphodiester internucleoside linkage. In certain embodiments, modified oligonucleotides have an internucleoside linkage motif of (5′ to 3′): ssssossssssssssooss, wherein each “s” represents a phosphorothioate internucleoside linkage and each “o” represents a phosphodiester internucleoside linkage. In certain embodiments, modified oligonucleotides have an internucleoside linkage motif of (5′ to 3′): ssoooossssssssssoss, wherein each “s” represents a phosphorothioate internucleoside linkage and each “o” represents a phosphodiester internucleoside linkage. In certain embodiments, modified oligonucleotides have an internucleoside linkage motif of (5′ to 3′): sssooossssssssssoss, wherein each “s” represents a phosphorothioate internucleoside linkage and each “o” represents a phosphodiester internucleoside linkage. In certain embodiments, modified oligonucleotides have an internucleoside linkage motif of (5′ to 3′): ssssoossssssssssoss, wherein each “s” represents a phosphorothioate internucleoside linkage and each “o” represents a phosphodiester internucleoside linkage.

[0486] In certain embodiments, modified oligonucleotides have an internucleoside linkage motif comprising one or more mesyl phosphoramidate linking groups. In certain embodiments, one or more phosphorothioate internucleoside linkages or one or more phosphodiester internucleoside linkages of the internucleoside linkage motifs herein is substituted with a mesyl phosphoramidate linking group.

### C. Certain Lengths

[0487] It is possible to increase or decrease the length of an oligonucleotide without eliminating activity. For example, in Woolf et al. (Proc. Natl. Acad. Sci. USA 89:7305-7309, 1992), a series of oligonucleotides 13-25 nucleobases in length were tested for their ability to induce cleavage of a target RNA in an oocyte injection model. Oligonucleotides 25 nucleobases in length with 8 or 11 mismatch bases near the ends of the oligonucleotides were able to direct specific cleavage of the target RNA, albeit to a lesser extent than the oligonucleotides that contained no mismatches. Similarly, target specific cleavage was achieved using 13 nucleobase oligonucleotides, including those with 1 or 3 mismatches.

[0488] In certain embodiments, oligonucleotides (including modified oligonucleotides) can have any of a variety of ranges of lengths. In certain embodiments, oligonucleotides consist of X to Y linked nucleosides, where X represents the fewest number of nucleosides in the range and Y represents the largest number nucleosides in the range. In certain such embodiments, X and Y are each independently selected from 8, 9, 10, 11, 12, 13, 14, 15, 16, 17, 18, 19, 20, 21, 22, 23, 24, 25, 26, 27, 28, 29, 30, 31, 32, 33, 34, 35, 36, 37, 38, 39, 40, 41, 42, 43, 44, 45, 46, 47, 48, 49, and 50; provided that X≤Y. For example, in certain embodiments, oligonucleotides consist of 12 to 13, 12 to 14, 12 to 15, 12 to 16, 12 to 17, 12 to 18, 12 to 19, 12 to 20, 12 to 21, 12 to 22, 12 to 23, 12 to 24, 12 to 25, 12 to 26, 12 to 27, 12 to 28, 12 to 29, 12 to 30, 13 to 14, 13 to 15, 13 to 16, 13 to 17, 13 to 18, 13 to 19, 13 to 20, 13 to 21, 13 to 22, 13 to 23, 13 to 24, 13 to 25, 13 to 26, 13 to 27, 13 to 28, 13 to 29, 13 to 30, 14 to 15, 14 to 16, 14 to 17, 14 to 18, 14 to 19, 14 to 20, 14 to 21, 14 to 22, 14 to 23, 14 to 24, 14 to 25, 14 to 26, 14 to 27, 14 to 28, 14 to 29, 14 to 30, 15 to 16, 15 to 17, 15 to 18, 15 to 19, 15 to 20, 15 to 21, 15 to 22, 15 to 23, 15 to 24, 15 to 25, 15 to 26, 15 to 27, 15 to 28, 15 to 29, 15 to 30, 16 to 17, 16 to 18, 16 to 19, 16 to 20, 16 to 21, 16 to 22, 16 to 23, 16 to 24, 16 to 25, 16 to 26, 16 to 27, 16 to 28, 16 to 29, 16 to 30, 17 to 18, 17 to 19, 17 to 20, 17 to 21, 17 to 22, 17 to 23, 17 to 24, 17 to 25, 17 to 26, 17 to 27, 17 to 28, 17 to 29, 17 to 30, 18 to 19, 18 to 20, 18 to 21, 18 to 22, 18 to 23, 18 to 24, 18 to 25, 18 to 26, 18 to 27, 18 to 28, 18 to 29, 18 to 30, 19 to 20, 19 to 21, 19 to 22, 19 to 23, 19 to 24, 19 to 25, 19 to 26, 19 to 29, 19 to 28, 19 to 29, 19 to 30, 20 to 21, 20 to 22, 20 to 23, 20 to 24, 20 to 25, 20 to 26, 20 to 27, 20 to 28, 20 to 29, 20 to 30, 21 to 22, 21 to 23, 21 to 24, 21 to 25, 21 to 26, 21 to 27, 21 to 28, 21 to 29, 21 to 30, 22 to 23, 22 to 24, 22 to 25, 22 to 26, 22 to 27, 22 to 28, 22 to 29, 22 to 30, 23 to 24, 23 to 25, 23 to 26, 23 to 27, 23 to 28, 23 to 29, 23 to 30, 24 to 25, 24 to 26, 24 to 27, 24 to 28, 24 to 29, 24 to 30, 25 to 26, 25 to 27, 25 to 28, 25 to 29, 25 to 30, 26 to 27, 26 to 28, 26 to 29, 26 to 30, 27 to 28, 27 to 29, 27 to 30, 28 to 29, 28 to 30, or 29 to 30 linked nucleosides.

### D. Certain Modified Oligonucleotides

[0489] In certain embodiments, the above modifications (sugar, nucleobase, internucleoside linkage) are incorporated into a modified oligonucleotide. In certain embodiments, modified oligonucleotides are characterized by their modification motifs and overall lengths. In certain embodiments, such parameters are each independent of one another. Thus, unless otherwise indicated, each internucleoside linkage of an oligonucleotide having a gapmer sugar motif may be modified or unmodified and may or may not follow the gapmer modification pattern of the sugar modifications. For example, the internucleoside linkages within the wing regions of a sugar gapmer may be the same or different from one another and may be the same or different from the internucleoside linkages of the gap region of the sugar motif. Likewise, such sugar gapmer oligonucleotides may comprise one or more modified nucleobase independent of the gapmer pattern of the sugar modifications. Unless otherwise indicated, all modifications are independent of nucleobase sequence.

### E. Certain Populations of Modified Oligonucleotides

[0490] Populations of modified oligonucleotides in which all of the modified oligonucleotides of the population have the same molecular formula can be stereorandom populations or chirally enriched populations. All of the chiral centers of all of the modified oligonucleotides are stereorandom in a stereorandom population. In a chirally enriched population, at least one particular chiral center is not stereorandom in the modified oligonucleotides of the population. In certain embodiments, the modified oligonucleotides of a chirally enriched population are enriched for β-D ribosyl sugar moieties, and all of the phosphorothioate internucleoside linkages are stereorandom. In certain embodiments, the modified oligonucleotides of a chirally enriched population are enriched for both β-D ribosyl sugar moieties and at least one particular phosphorothioate internucleoside linkage in a particular stereochemical configuration.

### F. Nucleobase Sequence

[0491] In certain embodiments, oligonucleotides (unmodified or modified oligonucleotides) are further described by their nucleobase sequence. In certain embodiments oligonucleotides have a nucleobase sequence that is complementary to a second oligonucleotide or an identified reference nucleic acid, such as a target nucleic acid. In certain such embodiments, a region of an oligonucleotide has a nucleobase sequence that is complementary to a second oligonucleotide or an identified reference nucleic acid, such as a target nucleic acid. In certain embodiments, the nucleobase sequence of a region or entire length of an oligonucleotide is at least 50%, at least 60%, at least 70%, at least 80%, at least 85%, at least 90%, at least 95%, or 100% complementary to the second oligonucleotide or nucleic acid, such as a target nucleic acid.

### II. Certain Oligomeric Compounds

[0492] In certain embodiments, provided herein are oligomeric compounds, which consist of an oligonucleotide (modified or unmodified) and optionally one or more conjugate groups and/or terminal groups. Conjugate groups consist of one or more conjugate moiety and a conjugate linker which links the conjugate moiety to the oligonucleotide. Conjugate groups may be attached to either or both ends of an oligonucleotide and/or at any internal position. In certain embodiments, conjugate groups are attached to the 2-position of a nucleoside of a modified oligonucleotide. In certain embodiments, conjugate groups that are attached to either or both ends of an oligonucleotide are terminal groups. In certain such embodiments, conjugate groups or terminal groups are attached at the 3′ and/or 5′-end of oligonucleotides. In certain such embodiments, conjugate groups (or terminal groups) are attached at the 3′-end of oligonucleotides. In certain embodiments, conjugate groups are attached near the 3′-end of oligonucleotides. In certain embodiments, conjugate groups (or terminal groups) are attached at the 5′-end of oligonucleotides. In certain embodiments, conjugate groups are attached near the 5′-end of oligonucleotides.

[0493] Examples of terminal groups include but are not limited to conjugate groups, capping groups, phosphate moieties, protecting groups, modified or unmodified nucleosides, and two or more nucleosides that are independently modified or unmodified.

### A. Certain Conjugate Groups

[0494] In certain embodiments, oligonucleotides are covalently attached to one or more conjugate groups. In certain embodiments, conjugate groups modify one or more properties of the attached oligonucleotide, including but not limited to pharmacodynamics, pharmacokinetics, stability, binding, absorption, tissue distribution, cellular distribution, cellular uptake, charge and clearance.

[0495] In certain embodiments, conjugation of one or more carbohydrate moieties to a modified oligonucleotide can optimize one or more properties of the modified oligonucleotide. In certain embodiments, the carbohydrate moiety is attached to a modified subunit of the modified oligonucleotide. For example, the ribose sugar of one or more ribonucleotide subunits of a modified oligonucleotide can be replaced with another moiety, e.g. a non-carbohydrate (preferably cyclic) carrier to which is attached a carbohydrate ligand. A ribonucleotide subunit in which the ribose sugar of the subunit has been so replaced is referred to herein as a ribose replacement modification subunit (RRMS), which is a modified sugar moiety. A cyclic carrier may be a carbocyclic ring system, i.e., one or more ring atoms may be a heteroatom, e.g., nitrogen, oxygen, sulphur. The cyclic carrier may be a monocyclic ring system, or may contain two or more rings, e.g. fused rings. The cyclic carrier may be a fully saturated ring system, or it may contain one or more double bonds. In certain embodiments, the modified oligonucleotide is a gapmer.

[0496] In certain embodiments, conjugate groups impart a new property on the attached oligonucleotide, e.g., fluorophores or reporter groups that enable detection of the oligonucleotide. Certain conjugate groups and conjugate moieties have been described previously, for example: cholesterol moiety (Letsinger et al., Proc. Natl. Acad. Sci. USA, 1989, 86, 6553-6556), cholic acid (Manoharan et al., Bioorg. Med. Chem. Lett., 1994, 4, 1053-1060), a thioether, e.g., hexyl-S-tritylthiol (Manoharan et al., Ann. N. Y. Acad. Sci., 1992, 660, 306-309; Manoharan et al., Bioorg. Med. Chem. Lett., 1993, 3, 2765-2770), a thiocholesterol (Oberhauser et al., Nucl. Acids Res., 1992, 20, 533-538), an aliphatic chain, e.g., do-decan-diol or undecyl residues (Saison-Behmoaras et al., EMBO J., 1991, 10, 1111-1118; Kabanov et al., FEBS Lett., 1990, 259, 327-330; Svinarchuk et al., Biochimie, 1993, 75, 49-54), a phospholipid. e.g., di-hexadecyl-rac-glycerol or triethyl-ammonium 1,2-di-O-hexadecyl-rac-glycero-3-H-phosphonate (Manoharan et al., Tetrahedron Lett., 1995, 36, 3651-3654; Shea et al., Nucl. Acids Res., 1990, 18, 3777-3783), a polyamine or a polyethylene glycol chain (Manoharan et al., Nucleosides & Nucleotides, 1995, 14, 969-973), or adamantane acetic acid a palmityl moiety (Mishra et al., Biochim. Biophys. Acta, 1995, 1264, 229-237), an octadecylamine or hexylamino-carbonyl-oxycholesterol moiety (Crooke et al., J. Pharmacol. Exp. Ther., 1996, 277, 923-937), a tocopherol group (Nishina et al., Molecular Therapy Nucleic Acids, 2015, 4, e220; and Nishina et al., Molecular Therapy, 2008, 16, 734-740), or a GalNAc cluster (e.g., WO2014/179620).

[0497] In certain embodiments, the conjugate group may comprise a conjugate moiety selected from any of a C22 alkyl, C20 alkyl, C16 alkyl, C10 alkyl, C21 alkyl, C19 alkyl, C18 alkyl, C15 alkyl, C14 alkyl, C13 alkyl, C12 alkyl, C11 alkyl, C9 alkyl, C8 alkyl, C7 alkyl, C6 alkyl, C5 alkyl, C22 alkenyl, C20 alkenyl, C16 alkenyl, C10 alkenyl, C21 alkenyl, C19 alkenyl, C18 alkenyl, C15 alkenyl, C14 alkenyl, C13 alkenyl, C12 alkenyl, C11 alkenyl, C9 alkenyl, C8 alkenyl, C7 alkenyl, C6 alkenyl, or C5 alkenyl.

[0498] In certain embodiments, the conjugate group may comprise a conjugate moiety selected from any of a C22 alkyl, C20 alkyl, C16 alkyl, C10 alkyl, C21 alkyl, C19 alkyl, C18 alkyl, C15 alkyl. C14 alkyl, C13 alkyl, C12 alkyl, C11 alkyl, C9 alkyl, C8 alkyl, C7 alkyl, C6 alkyl, or C5 alkyl, where the alkyl chain has one or more unsaturated bonds.

[0499] In certain embodiments, a conjugate group is a lipid having the following structure:

[chemical structure]

### 1. Conjugate Moieties

[0500] Conjugate moieties include, without limitation, intercalators, reporter molecules, polyamines, polyamides, peptides, carbohydrates (e.g., GalNAc), vitamin moieties, polyethylene glycols, thioethers, polyethers, cholesterols, thiocholesterols, cholic acid moieties, folate, lipids, phospholipids, biotin, phenazine, phenanthridine, anthraquinone, adamantane, acridine, fluoresceins, rhodamines, coumarins, fluorophores, and dyes.

[0501] In certain embodiments, a conjugate moiety comprises an active drug substance, for example, aspirin, warfarin, phenylbutazone, ibuprofen, suprofen, fenbufen, ketoprofen, (S)-(+)-pranoprofen, carprofen, dansylsarcosine, 2,3,5-triiodobenzoic acid, fingolimod, flufenamic acid, folinic acid, a benzothiadiazide, chlorothiazide, a diazepine, indomethicin, a barbiturate, a cephalosporin, a sulfa drug, an antidiabetic, an antibacterial or an antibiotic.

### 2. Conjugate Linkers

[0502] Conjugate moieties are attached to oligonucleotides through conjugate linkers. In certain oligomeric compounds, the conjugate linker is a single chemical bond (i.e., the conjugate moiety is attached directly to an oligonucleotide through a single bond). In certain embodiments, the conjugate linker comprises a chain structure, such as a hydrocarbyl chain, or an oligomer of repeating units such as ethylene glycol, nucleosides, or amino acid units.

[0503] In certain embodiments, a conjugate linker comprises pyrrolidine.

[0504] In certain embodiments, a conjugate linker comprises one or more groups selected from alkyl, amino, oxo, amide, disulfide, polyethylene glycol, ether, thioether, and hydroxylamino groups. In certain such embodiments, the conjugate linker comprises one or more groups selected from alkyl, amino, oxo, amide, and ether groups. In certain embodiments, the conjugate linker comprises one or more groups selected from alkyl and amide groups. In certain embodiments, the conjugate linker comprises one or more groups selected from alkyl and ether groups. In certain embodiments, the conjugate linker comprises at least one phosphorus moiety. In certain embodiments, the conjugate linker comprises at least one phosphate group. In certain embodiments, the conjugate linker includes at least one neutral linking group.

[0505] In certain embodiments, conjugate linkers, including the conjugate linkers described above, are bifunctional linking moieties, e.g., those known in the art to be useful for attaching conjugate moieties to compounds, such as the oligonucleotides provided herein. In general, a bifunctional linking moiety comprises at least two functional groups. One of the functional groups is selected to react with a particular site on a compound and the other is selected to react with a conjugate moiety. Examples of functional groups used in a bifunctional linking moiety include, but are not limited to, electrophiles for reacting with nucleophilic groups and nucleophiles for reacting with electrophilic groups. In certain embodiments, bifunctional linking moieties comprise one or more groups selected from amino, hydroxyl, carboxylic acid, thiol, alkyl, alkenyl, and alkynyl.

[0506] Examples of conjugate linkers include but are not limited to pyrrolidine, 8-amino-3,6-dioxaoctanoic acid (ADO), succinimidyl 4-(N-maleimidomethyl) cyclohexane-1-carboxylate (SMCC), and 6-aminohexanoic acid (AHEX or AHA). Other conjugate linkers include but are not limited to a substituted or unsubstituted C₁-C₁₀ alkyl, a substituted or unsubstituted C₂-C₁₀ alkenyl or a substituted or unsubstituted C₂-C₁₀ alkynyl, wherein a nonlimiting list of preferred substituent groups includes hydroxyl, amino, alkoxy, carboxy, benzyl, phenyl, nitro, thiol, thioalkoxy, halogen, alkyl, aryl, alkenyl, and alkynyl.

[0507] In certain embodiments, conjugate linkers comprise 1-10 linker-nucleosides. In certain embodiments, conjugate linkers comprise 2-5 linker-nucleosides. In certain embodiments, conjugate linkers comprise exactly 3 linker-nucleosides. In certain embodiments, conjugate linkers comprise the TCA motif. In certain embodiments, such linker-nucleosides are modified nucleosides. In certain embodiments such linker-nucleosides comprise a modified sugar moiety. In certain embodiments, linker-nucleosides are unmodified. In certain embodiments, linker-nucleosides comprise an optionally protected heterocyclic base selected from a purine, a substituted purine, a pyrimidine or substituted pyrimidine. In certain embodiments, a cleavable moiety is a nucleoside selected from uracil, thymine, cytosine, 4-N-benzoylcytosine, 5-methyl cytosine, 4-N-benzoyl-5-methyl cytosine, adenine, 6-N-benzoyladenine, guanine and 2-N-isobutyrylguanine. It is typically desirable for linker-nucleosides to be cleaved from the oligomeric compound after it reaches a target tissue. Accordingly, linker-nucleosides are typically linked to one another and to the remainder of the oligomeric compound through cleavable bonds. In certain embodiments, such cleavable bonds are phosphodiester bonds.

[0508] Herein, linker-nucleosides are not considered to be part of the oligonucleotide. Accordingly, in embodiments in which an oligomeric compound comprises an oligonucleotide consisting of a specified number or range of linked nucleosides and/or a specified percent complementarity to a reference nucleic acid, and the oligomeric compound also comprises a conjugate group comprising a conjugate linker comprising linker-nucleosides, those linker-nucleosides are not counted toward the length of the oligonucleotide and are not used in determining the percent complementarity of the oligonucleotide for the reference nucleic acid. For example, an oligomeric compound may comprise (1) a modified oligonucleotide consisting of 8-30 nucleosides and (2) a conjugate group comprising 1-10 linker-nucleosides that are contiguous with the nucleosides of the modified oligonucleotide. The total number of contiguous linked nucleosides in such an oligomeric compound is more than 30. Alternatively, an oligomeric compound may comprise a modified oligonucleotide consisting of 8-30 nucleosides and no conjugate group. The total number of contiguous linked nucleosides in such an oligomeric compound is no more than 30. Unless otherwise indicated conjugate linkers comprise no more than 10 linker-nucleosides. In certain embodiments, conjugate linkers comprise no more than 5 linker-nucleosides. In certain embodiments, conjugate linkers comprise no more than 3 linker-nucleosides. In certain embodiments, conjugate linkers comprise no more than 2 linker-nucleosides. In certain embodiments, conjugate linkers comprise no more than 1 linker-nucleoside.

[0509] In certain embodiments, it is desirable for a conjugate group to be cleaved from the oligonucleotide. For example, in certain circumstances oligomeric compounds comprising a particular conjugate moiety are better taken up by a particular cell type, but once the oligomeric compound has been taken up, it is desirable that the conjugate group be cleaved to release the unconjugated or parent oligonucleotide. Thus, certain conjugate linkers may comprise one or more cleavable moieties. In certain embodiments, a cleavable moiety is a cleavable bond. In certain embodiments, a cleavable moiety is a group of atoms comprising at least one cleavable bond. In certain embodiments, a cleavable moiety comprises a group of atoms having one, two, three, four, or more than four cleavable bonds. In certain embodiments, a cleavable moiety is selectively cleaved inside a cell or subcellular compartment, such as a lysosome. In certain embodiments, a cleavable moiety is selectively cleaved by endogenous enzymes, such as nucleases.

[0510] In certain embodiments, a cleavable bond is selected from among an amide, an ester, an ether, one or both esters of a phosphodiester, a phosphate ester, a carbamate, or a disulfide. In certain embodiments, a cleavable bond is one or both of the esters of a phosphodiester. In certain embodiments, a cleavable moiety comprises a phosphate or phosphodiester. In certain embodiments, the cleavable moiety is a phosphate linkage between an oligonucleotide and a conjugate moiety or conjugate group.

[0511] In certain embodiments, a cleavable moiety comprises or consists of one or more linker-nucleosides. In certain such embodiments, the one or more linker-nucleosides are linked to one another and/or to the remainder of the oligomeric compound through cleavable bonds. In certain embodiments, such cleavable bonds are unmodified phosphodiester bonds. In certain embodiments, a cleavable moiety is a 2′-deoxynucleoside that is attached to either the 3′ or 5-terminal nucleoside of an oligonucleotide by a phosphate internucleoside linkage and covalently attached to the remainder of the conjugate linker or conjugate moiety by a phosphate or phosphorothioate linkage. In certain such embodiments, the cleavable moiety is 2′-deoxyadenosine.

### 3. Cell-Targeting Moieties

[0512] In certain embodiments, a conjugate group comprises a cell-targeting moiety. In certain embodiments, a conjugate group has the general formula:

[chemical structure]

[0513] wherein n is from 1 to about 3, m is 0 when n is 1, m is 1 when n is 2 or greater, j is 1 or 0, and k is 1 or 0.

[0514] In certain embodiments, n is 1, j is 1 and k is 0. In certain embodiments, n is 1, j is 0 and k is 1. In certain embodiments, n is 1, j is 1 and k is 1. In certain embodiments, n is 2, j is 1 and k is 0. In certain embodiments, n is 2, j is 0 and k is 1. In certain embodiments, n is 2, j is 1 and k is 1. In certain embodiments, n is 3, j is 1 and k is 0. In certain embodiments, n is 3, j is 0 and k is 1. In certain embodiments, n is 3, j is 1 and k is 1.

[0515] In certain embodiments, conjugate groups comprise cell-targeting moieties that have at least one tethered ligand. In certain embodiments, cell-targeting moieties comprise two tethered ligands covalently attached to a branching group.

[0516] In certain embodiments, each ligand of a cell-targeting moiety has an affinity for at least one type of receptor on a target cell. In certain embodiments, each ligand has an affinity for at least one type of receptor on the surface of a mammalian liver cell. In certain embodiments, each ligand has an affinity for the hepatic asialoglycoprotein receptor (ASGP-R). In certain embodiments, each ligand is a carbohydrate.

[0517] In certain embodiments, a conjugate group comprises a cell-targeting conjugate moiety. In certain embodiments, a conjugate group has the general formula:

[chemical structure]

[0518] wherein n is from 1 to about 3, m is 0 when n is 1, m is 1 when n is 2 or greater, j is 1 or 0, and k is 1 or 0.

[0519] In certain embodiments, n is 1, j is 1 and k is 0. In certain embodiments, n is 1, j is 0 and k is 1. In certain embodiments, n is 1, j is 1 and k is 1. In certain embodiments, n is 2, j is 1 and k is 0. In certain embodiments, n is 2, j is 0 and k is 1. In certain embodiments, n is 2, j is 1 and k is 1. In certain embodiments, n is 3, j is 1 and k is 0. In certain embodiments, n is 3, j is 0 and k is 1. In certain embodiments, n is 3, j is 1 and k is 1.

[0520] In certain embodiments, conjugate groups comprise cell-targeting moieties that have at least one tethered ligand. In certain embodiments, cell-targeting moieties comprise two tethered ligands covalently attached to a branching group. In certain embodiments, cell-targeting moieties comprise three tethered ligands covalently attached to a branching group.

### B. Certain Terminal Groups

[0521] In certain embodiments, oligomeric compounds comprise one or more terminal groups. In certain such embodiments, oligomeric compounds comprise a stabilized 5′-phosphate. Stabilized 5′-phosphates include, but are not limited to 5′-phosphonates, including, but not limited to 5′-vinylphosphonates. In certain embodiments, terminal groups comprise one or more abasic sugar moieties and/or inverted nucleosides. In certain embodiments, terminal groups comprise one or more 2′-linked nucleosides or sugar moieties. In certain such embodiments, the 2′-linked group is an abasic sugar moiety.

### III. Antisense Activity

[0522] In certain embodiments, oligomeric compounds and oligomeric duplexes are capable of hybridizing to a target nucleic acid, resulting in at least one antisense activity; such oligomeric compounds and oligomeric duplexes are antisense compounds. In certain embodiments, antisense compounds have antisense activity when they reduce or inhibit the amount or activity of a target nucleic acid by 25% or more in the standard cell assay. In certain embodiments, antisense compounds selectively affect one or more target nucleic acid. Such antisense compounds comprise a nucleobase sequence that hybridizes to one or more target nucleic acid, resulting in one or more desired antisense activity and does not hybridize to one or more non-target nucleic acid or does not hybridize to one or more non-target nucleic acid in such a way that results in significant undesired antisense activity.

[0523] In certain antisense activities, hybridization of an antisense compound to a target nucleic acid results in recruitment of a protein that cleaves the target nucleic acid. For example, certain antisense compounds result in RNase H mediated cleavage of the target nucleic acid. RNase H is a cellular endonuclease that cleaves the RNA strand of an RNA:DNA duplex. The DNA in such an RNA:DNA duplex need not be unmodified DNA. In certain embodiments, described herein are antisense compounds that are sufficiently “DNA-like” to elicit RNase H activity. In certain embodiments, one or more non-DNA-like nucleoside in the gap of a gapmer is tolerated.

[0524] In certain antisense activities, an antisense compound or a portion of an antisense compound is loaded into an RNA-induced silencing complex (RISC), ultimately resulting in cleavage of the target nucleic acid. For example, certain antisense compounds result in cleavage of the target nucleic acid by Argonaute. Antisense compounds that are loaded into RISC are RNAi compounds. RNAi compounds may be double-stranded (siRNA or dsRNAi) or single-stranded (ssRNA).

[0525] In certain embodiments, hybridization of an antisense compound to a target nucleic acid does not result in recruitment of a protein that cleaves that target nucleic acid. In certain embodiments, hybridization of the antisense compound to the target nucleic acid results in alteration of splicing of the target nucleic acid. In certain embodiments, hybridization of an antisense compound to a target nucleic acid results in inhibition of a binding interaction between the target nucleic acid and a protein or other nucleic acid. In certain embodiments, hybridization of an antisense compound to a target nucleic acid results in alteration of translation of the target nucleic acid.

[0526] Antisense activities may be observed directly or indirectly. In certain embodiments, observation or detection of an antisense activity involves observation or detection of a change in an amount of a target nucleic acid or protein encoded by such target nucleic acid, a change in the ratio of splice variants of a nucleic acid or protein and/or a phenotypic change in a cell or animal.

### IV. Certain Target Nucleic Acids

[0527] In certain embodiments, oligomeric compounds comprise or consist of an oligonucleotide comprising a region that is complementary to a target nucleic acid. In certain embodiments, the target nucleic acid is an endogenous RNA molecule. In certain embodiments, the target nucleic acid encodes a protein. In certain such embodiments, the target nucleic acid is selected from: a mature mRNA and a pre-mRNA, including intronic, exonic and untranslated regions. In certain embodiments, the target RNA is a mature mRNA. In certain embodiments, the target nucleic acid is a pre-mRNA. In certain embodiments, the target region is entirely within an intron. In certain embodiments, the target region spans an intron/exon junction. In certain embodiments, the target region is at least 50% within an intron.

### A. Complementarity/Mismatches to the Target Nucleic Acid and Duplex Complementarity

[0528] In certain embodiments, oligonucleotides are complementary to the target nucleic acid over the entire length of the oligonucleotide. In certain embodiments, oligonucleotides are 99%, 95%, 90%, 85%, or 80% complementary to the target nucleic acid. In certain embodiments, oligonucleotides are at least 80% complementary to the target nucleic acid over the entire length of the oligonucleotide and comprise a region that is 100% or fully complementary to a target nucleic acid. In certain embodiments, the region of full complementarity is from 6 to 20, 10 to 18, or 18 to 20 nucleobases in length.

[0529] It is possible to introduce mismatch bases without eliminating activity. For example, Gautschi et al (J. Natl. Cancer Inst. 93:463-471, March 2001) demonstrated the ability of an oligonucleotide having 100% complementarity to the bcl-2 mRNA and having 3 mismatches to the bcl-xL mRNA to reduce the expression of both bcl-2 and bcl-xL in vitro and in vivo. Furthermore, this oligonucleotide demonstrated potent anti-tumor activity in vivo. Maher and Dolnick (Nuc. Acid. Res. 16:3341-3358, 1988) tested a series of tandem 14 nucleobase oligonucleotides, and 28 and 42 nucleobase oligonucleotides comprised of the sequence of two or three of the tandem oligonucleotides, respectively, for their ability to arrest translation of human DHFR in a rabbit reticulocyte assay. Each of the three 14 nucleobase oligonucleotides alone was able to inhibit translation, albeit at a more modest level than the 28 or 42 nucleobase oligonucleotides.

[0530] In certain embodiments, oligonucleotides comprise one or more mismatched nucleobases relative to the target nucleic acid. In certain embodiments, antisense activity against the target is reduced by such mismatch, but activity against a non-target is reduced by a greater amount. Thus, in certain embodiments selectivity of the oligonucleotide is improved. In certain embodiments, the mismatch is specifically positioned within an oligonucleotide having a gapmer motif. In certain embodiments, the mismatch is at position 1, 2, 3, 4, 5, 6, 7, or 8 from the 5′-end of the gap region. In certain embodiments, the mismatch is at position 9, 8, 7, 6, 5, 4, 3, 2, 1 from the 3′-end of the gap region. In certain embodiments, the mismatch is at position 1, 2, 3, or 4 from the 5′-end of the wing region. In certain embodiments, the mismatch is at position 4, 3, 2, or 1 from the 3′-end of the wing region.

B. IFNAR1 In certain embodiments, oligomeric agents or oligomeric compounds comprise or consist of an oligonucleotide

[0531] comprising a region that is complementary to a target nucleic acid, wherein the target nucleic acid is an IFNAR1 nucleic acid. In certain embodiments, an IFNAR1 nucleic acid has the sequence set forth in SEQ ID NO: 1 (GENBANK Accession No. NC 000021.9, truncated from nucleosides 33321001 to 33363000) or SEQ ID NO: 2 (GENBANK Accession No. NM_000629.2). In certain embodiments, contacting a cell with an oligomeric compound complementary to SEQ ID NO: 1 or SEQ ID NO: 2 reduces the amount of IFNAR1 RNA, and in certain embodiments reduces the amount of IFNAR1 protein. In certain embodiments, the oligomeric compound consists of a modified oligonucleotide. In certain embodiments, the oligomeric compound consists of a modified oligonucleotide and a conjugate group.

### C. Certain Target Nucleic Acids in Certain Tissues

[0532] In certain embodiments, oligomeric compounds comprise or consist of an oligonucleotide comprising a region that is complementary to a target nucleic acid, wherein the target nucleic acid is expressed in a pharmacologically relevant tissue. In certain embodiments, the pharmacologically relevant tissues are the brain and spinal cord. In certain embodiments, the target nucleic acid is expressed in a pharmacologically relevant cell. In certain embodiments the pharmacologically relevant cell is a neuron or a glial cell. In certain embodiments, the pharmacologically relevant cell is an astrocyte or a microglial cell. In certain embodiments, the pharmacologically relevant cell is a vascular smooth muscle cell, a vascular endothelial cell, or a pericyte.

### V. Certain Methods and Uses

[0533] Certain embodiments provided herein relate to methods of inhibiting IFNAR1 expression, which can be useful for treating a disease associated with neuroinflammation, for example, a disease associated with elevated type I interferon signaling, or with over-expression of a type I interferons in a subject, by administration of an oligomeric agent, oligomeric compound, modified oligonucleotide, or oligomeric duplex, any of which comprising a modified oligonucleotide having a nucleobase sequence complementary to an IFNAR1 nucleic acid.

[0534] Examples of diseases treatable with the oligomeric agents, oligomeric compounds, modified oligonucleotides, oligomeric duplexes, and methods provided herein include neurological diseases or conditions associated with neuroinflammation, for example, a disease associated with elevated type I interferon signaling, or with over-expression of type I interferons, selected from Aicardi-Goutières Syndrome, stroke, neuropsychiatric systemic lupus erythematosus, neuroinflammation following traumatic brain injury, neuro-autoimmune disorders, Alzheimer's disease, post-operative delirium and cognitive decline, cranial radiation-induced cognitive decline, viral infection-induced cognitive decline, neuromyelitis optica, and ataxia telangiectasia. In certain embodiments, a method comprises administering to a subject an oligomeric agent, an oligomeric compound, a modified oligonucleotide, or an oligomeric duplex, any of which have a nucleobase sequence complementary to an IFNAR1 nucleic acid. In certain embodiments, the subject has a neurological disease or condition associated with neuroinflammation selected from Aicardi-Goutières Syndrome, stroke, neuropsychiatric systemic lupus erythematosus, neuroinflammation following traumatic brain injury, neuro-autoimmune disorders, Alzheimer's disease, post-operative delirium and cognitive decline, cranial radiation-induced cognitive decline, viral infection-induced cognitive decline, neuromyelitis optica, and ataxia telangiectasia. In certain embodiments, a method of treating neurological diseases or conditions associated with neuroinflammation selected from Aicardi-Goutières Syndrome, stroke, neuropsychiatric systemic lupus erythematosus, neuroinflammation following traumatic brain injury, neuro-autoimmune disorders, Alzheimer's disease, post-operative delirium and cognitive decline, cranial radiation-induced cognitive decline, viral infection-induced cognitive decline, neuromyelitis optica, and ataxia telangiectasia in a subject comprises administering to the subject a therapeutically effective amount of an oligomeric agent, an oligomeric compound, a modified oligonucleotide, or an oligomeric duplex, any of which having a nucleobase sequence complementary to an IFNAR1 nucleic acid, thereby treating the subject. In certain embodiments, administering the therapeutically effective amount of the oligomeric agent, oligomeric compound, or modified oligonucleotide improves a symptom or hallmark of a disease or condition associated with neuroinflammation. In certain embodiments, the symptom or hallmark is selected from seizures, difficulty feeding, dystonia, spasticity, delayed motor development, delayed language development, delayed social skill development, white matter abnormalities, T cell infiltration, B cell infiltration, striatal necrosis, brain atrophy, basal ganglia calcification, and microencephaly. In certain embodiments, administering the therapeutically effective amount of the oligomeric agent, oligomeric compound, or modified oligonucleotide reduces type I IFN signaling or lymphocytosis in cerebrospinal fluid in the subject.

[0535] In certain embodiments, a method of inhibiting expression of IFNAR1 nucleic acid, such as RNA, in a subject having a disease associated with neuroinflammation, for example, a disease associated with elevated type I interferon signaling, or with over-expression of type I interferons, comprises administering to the subject an oligomeric agent, an oligomeric compound, a modified oligonucleotide, or an oligomeric duplex, any of which having a nucleobase sequence complementary to an IFNAR1 nucleic acid, thereby inhibiting expression of IFNAR1 nucleic acid in the subject. In certain embodiments, administering the oligomeric agent, the oligomeric compound, the modified oligonucleotide, or the oligomeric duplex inhibits expression of IFNAR1 in the brain or the spinal cord. In certain embodiments, the subject has a neurological disease or condition associated with neuroinflammation selected from Aicardi-Goutières Syndrome, stroke, neuropsychiatric systemic lupus erythematosus, neuroinflammation following traumatic brain injury, neuro-autoimmune disorders, Alzheimer's disease, post-operative delirium and cognitive decline, cranial radiation-induced cognitive decline, viral infection-induced cognitive decline, neuromyelitis optica, and ataxia telangiectasia. In certain embodiments, a method of inhibiting expression of IFNAR1 nucleic acid in a cell comprises contacting the cell with an oligomeric agent, an oligomeric compound, a modified oligonucleotide, or an oligomeric duplex, any of which having a nucleobase sequence complementary to an IFNAR1 nucleic acid, thereby inhibiting expression of IFNAR1 nucleic acid in the cell. In certain embodiments, the cell is glial cell, for example, an astrocyte or a microglial cell. In certain embodiments, the cell is in a subject having a neurological disease or condition associated with neuroinflammation selected from Aicardi-Goutières Syndrome, stroke, neuropsychiatric systemic lupus erythematosus, neuroinflammation following traumatic brain injury, neuro-autoimmune disorders, Alzheimer's disease, post-operative delirium and cognitive decline, cranial radiation-induced cognitive decline, viral infection-induced cognitive decline, neuromyelitis optica, and ataxia telangiectasia.

[0536] Certain embodiments are drawn to an oligomeric agent, an oligomeric compound, a modified oligonucleotide, or an oligomeric duplex, any of which having a nucleobase sequence complementary to an IFNAR1 nucleic acid, for use in treating a disease associated with neuroinflammation associated with neuroinflammation, for example, a disease associated with elevated type I interferon signaling, or with over-expression of IFNa. In certain embodiments, the disease is a neurological disease or condition associated with neuroinflammation selected from Aicardi-Goutières Syndrome, stroke, neuropsychiatric systemic lupus erythematosus, neuroinflammation following traumatic brain injury, neuro-autoimmune disorders, Alzheimer's disease, post-operative delirium and cognitive decline, cranial radiation-induced cognitive decline, viral infection-induced cognitive decline, neuromyelitis optica, and ataxia telangiectasia. In certain embodiments, an oligomeric agent, an oligomeric compound, a modified oligonucleotide, or an oligomeric duplex is for use in improving a symptom or hallmark of a disease or condition associated with neuroinflammation selected from Aicardi-Goutières Syndrome, stroke, neuropsychiatric systemic lupus erythematosus, neuroinflammation following traumatic brain injury, neuro-autoimmune disorders, Alzheimer's disease, post-operative delirium and cognitive decline, cranial radiation-induced cognitive decline, viral infection-induced cognitive decline, neuromyelitis optica, and ataxia telangiectasia. In certain embodiments, the symptom or hallmark is selected from seizures, difficulty feeding, dystonia, spasticity, delayed motor development, delayed language development, delayed social skill development, white matter abnormalities, T cell infiltration, B cell infiltration, striatal necrosis, brain atrophy, basal ganglia calcification, and microencephaly. In certain embodiments, an oligomeric agent, an oligomeric compound, a modified oligonucleotide, or an oligomeric duplex is for use in reducing type I IFN signaling or lymphocytosis in the cerebrospinal fluid in a subject.

[0537] Certain embodiments are drawn to an oligomeric agent, an oligomeric compound, a modified oligonucleotide, or an oligomeric duplex, any of which comprising a modified oligonucleotide having a nucleobase sequence complementary to an IFNAR1 nucleic acid, for the manufacture or preparation of a medicament for treating a disease associated with neuroinflammation, for example, a disease associated with elevated type I interferon signaling, or with over-expression of IFNa. In certain embodiments, the disease is a neurological disease or condition associated with neuroinflammation selected from Aicardi-Goutières Syndrome, stroke, neuropsychiatric systemic lupus erythematosus, neuroinflammation following traumatic brain injury, neuro-autoimmune disorders, Alzheimer's disease, post-operative delirium and cognitive decline, cranial radiation-induced cognitive decline, viral infection-induced cognitive decline, neuromyelitis optica, and ataxia telangiectasia. In certain embodiments, an oligomeric agent, oligomeric compound, modified oligonucleotide, or oligomeric duplex is for the manufacture or preparation of a medicament for improving symptoms or hallmarks associated with Aicardi-Goutières Syndrome, stroke, neuropsychiatric systemic lupus erythematosus, neuroinflammation following traumatic brain injury, neuro-autoimmune disorders, Alzheimer's disease, post-operative delirium and cognitive decline, cranial radiation-induced cognitive decline, viral infection-induced cognitive decline, neuromyelitis optica, and ataxia telangiectasia. In certain embodiments, the symptom or hallmark is selected from seizures, difficulty feeding, dystonia, spasticity, delayed motor development, delayed language development, delayed social skill development, white matter abnormalities, T cell infiltration, B cell infiltration, striatal necrosis, brain atrophy, basal ganglia calcification, and microencephaly. In certain embodiments, an oligomeric agent, an oligomeric compound, a modified oligonucleotide, or an oligomeric duplex is for the manufacture or preparation of a medicament for use in reducing type I IFN signaling or lymphocytosis in the cerebrospinal fluid in a subject.

[0538] In any of the methods or uses described herein, the oligomeric agent, oligomeric compound, modified oligonucleotide, or oligomeric duplex can be any described herein.

### VI. Certain Pharmaceutical Compositions

[0539] In certain embodiments, described herein are pharmaceutical compositions comprising one or more oligomeric compounds. In certain embodiments, the one or more oligomeric compounds each consists of a modified oligonucleotide. In certain embodiments, the pharmaceutical composition comprises a pharmaceutically acceptable diluent or carrier. In certain embodiments, a pharmaceutical composition comprises or consists of a sterile saline solution and one or more oligomeric compound. In certain embodiments, the sterile saline is pharmaceutical grade saline. In certain embodiments, a pharmaceutical composition comprises or consists of one or more oligomeric compound and sterile water. In certain embodiments, the sterile water is pharmaceutical grade water. In certain embodiments, a pharmaceutical composition comprises or consists of one or more oligomeric compound and phosphate-buffered saline (PBS). In certain embodiments, the sterile PBS is pharmaceutical grade PBS. In certain embodiments, a pharmaceutical composition comprises or consists of one or more oligomeric compound and artificial cerebrospinal fluid. In certain embodiments, the artificial cerebrospinal fluid is pharmaceutical grade artificial cerebrospinal fluid.

[0540] In certain embodiments, a pharmaceutical composition comprises a modified oligonucleotide and PBS. In certain embodiments, a pharmaceutical composition consists of a modified oligonucleotide and PBS. In certain embodiments, a pharmaceutical composition consists essentially of a modified oligonucleotide and PBS. In certain embodiments, the PBS is pharmaceutical grade.

[0541] In certain embodiments, a pharmaceutical composition comprises a modified oligonucleotide and artificial cerebrospinal fluid. In certain embodiments, a pharmaceutical composition consists of a modified oligonucleotide and artificial cerebrospinal fluid. In certain embodiments, a pharmaceutical composition consists essentially of a modified oligonucleotide and artificial cerebrospinal fluid. In certain embodiments, the artificial cerebrospinal fluid is pharmaceutical grade.

[0542] In certain embodiments, pharmaceutical compositions comprise one or more oligomeric compound and one or more excipients. In certain embodiments, excipients are selected from water, salt solutions, alcohol, polyethylene glycols, gelatin, lactose, amylase, magnesium stearate, talc, silicic acid, viscous paraffin, hydroxymethylcellulose, and polyvinylpyrrolidone.

[0543] In certain embodiments, oligomeric compounds may be admixed with pharmaceutically acceptable active and/or inert substances for the preparation of pharmaceutical compositions or formulations. Compositions and methods for the formulation of pharmaceutical compositions depend on a number of criteria, including, but not limited to, route of administration, extent of disease, or dose to be administered.

[0544] In certain embodiments, pharmaceutical compositions comprising an oligomeric compound encompass any pharmaceutically acceptable salts of the oligomeric compound, esters of the oligomeric compound, or salts of such esters. In certain embodiments, pharmaceutical compositions comprising oligomeric compounds comprising one or more oligonucleotide, upon administration to an animal, including a human, are capable of providing (directly or indirectly) the biologically active metabolite or residue thereof. Accordingly, for example, the disclosure is also drawn to pharmaceutically acceptable salts of oligomeric compounds, prodrugs, pharmaceutically acceptable salts of such prodrugs, and other bioequivalents. Suitable pharmaceutically acceptable salts include, but are not limited to, sodium and potassium salts. In certain embodiments, prodrugs comprise one or more conjugate group attached to an oligonucleotide, wherein the conjugate group is cleaved by endogenous nucleases within the body.

[0545] Lipid moieties have been used in nucleic acid therapies in a variety of methods. In certain such methods, the nucleic acid, such as an oligomeric compound, is introduced into preformed liposomes or lipoplexes made of mixtures of cationic lipids and neutral lipids. In certain methods, DNA complexes with mono- or poly-cationic lipids are formed without the presence of a neutral lipid. In certain embodiments, a lipid moiety is selected to increase distribution of a pharmaceutical agent to a particular cell or tissue. In certain embodiments, a lipid moiety is selected to increase distribution of a pharmaceutical agent to fat tissue. In certain embodiments, a lipid moiety is selected to increase distribution of a pharmaceutical agent to muscle tissue.

[0546] In certain embodiments, pharmaceutical compositions comprise a delivery system. Examples of delivery systems include, but are not limited to, liposomes and emulsions. Certain delivery systems are useful for preparing certain pharmaceutical compositions including those comprising hydrophobic compounds. In certain embodiments, certain organic solvents such as dimethylsulfoxide are used.

[0547] In certain embodiments, pharmaceutical compositions comprise one or more tissue-specific delivery molecules designed to deliver the one or more pharmaceutical agents of the present invention to specific tissues or cell types. For example, in certain embodiments, pharmaceutical compositions include liposomes coated with a tissue-specific antibody.

[0548] In certain embodiments, pharmaceutical compositions comprise a co-solvent system. Certain of such co-solvent systems comprise, for example, benzyl alcohol, a nonpolar surfactant, a water-miscible organic polymer, and an aqueous phase. In certain embodiments, such co-solvent systems are used for hydrophobic compounds. A non-limiting example of such a co-solvent system is the VPD co-solvent system, which is a solution of absolute ethanol comprising 3% w/v benzyl alcohol, 8% w/v of the nonpolar surfactant Polysorbate 80™ and 65% w/v polyethylene glycol 300. The proportions of such co-solvent systems may be varied considerably without significantly altering their solubility and toxicity characteristics. Furthermore, the identity of co-solvent components may be varied: for example, other surfactants may be used instead of Polysorbate 80™; the fraction size of polyethylene glycol may be varied; other biocompatible polymers may replace polyethylene glycol, e.g., polyvinyl pyrrolidone; and other sugars or polysaccharides may substitute for dextrose.

[0549] In certain embodiments, pharmaceutical compositions are prepared for oral administration. In certain embodiments, pharmaceutical compositions are prepared for buccal administration. In certain embodiments, a pharmaceutical composition is prepared for administration by injection (e.g., intravenous, subcutaneous, intramuscular, intrathecal (IT), intracerebroventricular (ICV), etc.). In certain of such embodiments, a pharmaceutical composition comprises a carrier and is formulated in aqueous solution, such as water or physiologically compatible buffers such as Hanks's solution, Ringer's solution, or physiological saline buffer. In certain embodiments, other ingredients are included (e.g., ingredients that aid in solubility or serve as preservatives). In certain embodiments, injectable suspensions are prepared using appropriate liquid carriers, suspending agents and the like. Certain pharmaceutical compositions for injection are presented in unit dosage form, e.g., in ampoules or in multi-dose containers. Certain pharmaceutical compositions for injection are suspensions, solutions or emulsions in oily or aqueous vehicles, and may contain formulatory agents such as suspending, stabilizing and/or dispersing agents. Certain solvents suitable for use in pharmaceutical compositions for injection include, but are not limited to, lipophilic solvents and fatty oils, such as sesame oil, synthetic fatty acid esters, such as ethyl oleate or triglycerides, and liposomes.

[0550] Under certain conditions, certain compounds disclosed herein act as acids. Although such compounds may be drawn or described in protonated (free acid) form, or ionized and in association with a cation (salt) form, aqueous solutions of such compounds exist in equilibrium among such forms. For example, a phosphate linkage of an oligonucleotide in aqueous solution exists in equilibrium among free acid, anion, and salt forms. Unless otherwise indicated, compounds described herein are intended to include all such forms. Moreover, certain oligonucleotides have several such linkages, each of which is in equilibrium. Thus, oligonucleotides in solution exist in an ensemble of forms at multiple positions all at equilibrium. The term “oligonucleotide” is intended to include all such forms. Drawn structures necessarily depict a single form. Nevertheless, unless otherwise indicated, such drawings are likewise intended to include corresponding forms. Herein, a structure depicting the free acid of a compound followed by the term “or a salt thereof” expressly includes all such forms that may be fully or partially protonated/de-protonated/in association with a cation. In certain instances, one or more specific cation is identified.

[0551] In certain embodiments, modified oligonucleotides or oligomeric compounds are in aqueous solution with sodium. In certain embodiments, modified oligonucleotides or oligomeric compounds are in aqueous solution with potassium. In certain embodiments, modified oligonucleotides or oligomeric compounds are in PBS. In certain embodiments, modified oligonucleotides or oligomeric compounds are in water. In certain such embodiments, the pH of the solution is adjusted with NaOH and/or HCl to achieve a desired pH.

[0552] Herein, certain specific doses are described. A dose may be in the form of a dosage unit. For clarity, a dose (or dosage unit) of a modified oligonucleotide or an oligomeric compound in milligrams indicates the mass of the free acid form of the modified oligonucleotide or oligomeric compound. As described above, in aqueous solution, the free acid is in equilibrium with anionic and salt forms. However, for the purpose of calculating dose, it is assumed that the modified oligonucleotide or oligomeric compound exists as a solvent-free, sodium-acetate free, anhydrous, free acid. For example, where a modified oligonucleotide or an oligomeric compound is in solution comprising sodium (e.g., saline), the modified oligonucleotide or oligomeric compound may be partially or fully de-protonated and in association with Na+ ions. However, the mass of the protons are nevertheless counted toward the weight of the dose, and the mass of the Na+ ions are not counted toward the weight of the dose. Thus, for example, a dose, or dosage unit, of 10 mg of Compound No. 1492069, equals the number of fully protonated molecules that weighs 10 mg. This would be equivalent to 10.76 mg of solvent-free, sodium acetate-free, anhydrous sodiated Compound No. 1492069. When an oligomeric compound comprises a conjugate group, the mass of the conjugate group is included in calculating the dose of such oligomeric compound. If the conjugate group also has an acid, the conjugate group is likewise assumed to be fully protonated for the purpose of calculating dose.

### VII. Certain Hotspot Regions

### 1. Nucleobases 5085-5133 of SEQ ID NO: 1

[0553] In certain embodiments, nucleobases 5085-5133 of SEQ ID NO: 1 comprise a hotspot region. In certain embodiments, modified oligonucleotides are complementary to an equal length portion within nucleobases 5085-5133 of SEQ ID NO: 1. In certain embodiments, modified oligonucleotides are 16 nucleobases in length. In certain embodiments, modified oligonucleotides are 20 nucleobases in length. In certain embodiments, modified oligonucleotides are gapmers. In certain embodiments, the gapmers are MOE gapmers. In certain embodiments, the gapmers are cEt gapmers. In certain embodiments, the sugar motif for the gapmers are selected from (from 5′ to 3′): eeeeeddddddddddeeeee, eeeeeeddddddddddeeee, and kkkddddddddddkkk; wherein each “d” represents a 2′-β-D-deoxyribosyl sugar moiety, each “e” represents a 2′-MOE sugar moiety, and each “k” represents a cEt modified sugar moiety. In certain embodiments, the nucleosides of the modified oligonucleotides are linked by a combination of phosphodiester and phosphorothioate internucleoside linkages. In certain embodiments, the nucleosides of the modified oligonucleotides are linked by phosphorothioate internucleoside linkages. In certain embodiments, the internucleoside linkage motif for the gapmers is selected from (from 5′ to 3′): sssssssssssssss, sosoossssssssssooss, sossoossssssssssoss, sossossssssssssooss, sosssssssssssssooss, sosooossssssssssoss, sosssossssssssssoss, sooosssssssssssooss, sooosossssssssssoss, sooossssssssssssoss, soooossssssssssooss, soooosssssssssssoss, sooooossssssssssoss, soosossssssssssooss, soossssssssssssooss, soosoossssssssssoss, soossossssssssssoss, soosssssssssssssoss, ssooossssssssssooss, sssoossssssssssooss, ssssossssssssssooss, ssoooossssssssssoss, sssooossssssssssoss, and ssssoossssssssssoss, wherein each “s” represents a phosphorothioate internucleoside linkage and each “o” represents a phosphodiester internucleoside linkage.

[0554] The nucleobase sequences of SEQ ID Nos: 31, 33, 37, 69, 376, 411, 528, 616, 709, 766, 838, and 945 are complementary to an equal length portion within nucleobases 5085-5133 of SEQ ID NO: 1.

[0555] The nucleobase sequences of Compound Nos. 1273156, 1273157, 1273160, 1273190, 1321435, 1322469, 1322618, 1322678, 1322794, 1322801, 1323239, and 1323343 are complementary to an equal length portion within nucleobases 5085-5133 of SEQ ID NO: 1.

[0556] In certain embodiments, modified oligonucleotides complementary to an equal length portion within nucleobases 5085-5133 of SEQ ID NO: 1 achieve at least 38% reduction of IFNAR1 RNA in vitro in the standard cell assay. In certain embodiments, modified oligonucleotides complementary to an equal length portion within nucleobases 5085-5133 of SEQ ID NO: 1 achieve an average of 61% reduction of IFNAR1 RNA in vitro in the standard cell assay.

### 2. Nucleobases 19997-20061 of SEQ ID NO: 1

[0557] In certain embodiments, nucleobases 19997-20061 of SEQ ID NO: 1 comprise a hotspot region. In certain embodiments, modified oligonucleotides are complementary to an equal length portion within nucleobases 19997-20061 of SEQ ID NO: 1. In certain embodiments, modified oligonucleotides are 16 nucleobases in length. In certain embodiments, modified oligonucleotides are 20 nucleobases in length. In certain embodiments, modified oligonucleotides are gapmers. In certain embodiments, the gapmers are MOE gapmers. In certain embodiments, the gapmers are cEt gapmers. In certain embodiments, the sugar motif for the gapmers are selected from (from 5′ to 3′): eeeeeddddddddddeeeee, eeeeeeddddddddddeeee, and kkkddddddddddkkk; wherein each “d” represents a 2′-β-D-deoxyribosyl sugar moiety, each “e” represents a 2′-MOE sugar moiety, and each “k” represents a cEt modified sugar moiety. In certain embodiments, the nucleosides of the modified oligonucleotides are linked by a combination of phosphodiester and phosphorothioate internucleoside linkages. In certain embodiments, the nucleosides of the modified oligonucleotides are linked by phosphorothioate internucleoside linkages. In certain embodiments, the internucleoside linkage motif for the gapmers is selected from (from 5′ to 3′): sssssssssssssss, sosoossssssssssooss, sossoossssssssssoss, sossossssssssssooss, sosssssssssssssooss, sosooossssssssssoss, sosssossssssssssoss, sooosssssssssssooss, sooosossssssssssoss, sooossssssssssssoss, soooossssssssssooss, soooosssssssssssoss, sooooossssssssssoss, soosossssssssssooss, soossssssssssssooss, soosoossssssssssoss, soossossssssssssoss, soosssssssssssssoss, ssooossssssssssooss, sssoossssssssssooss, ssssossssssssssooss, ssoooossssssssssoss, sssooossssssssssoss, and ssssoossssssssssoss, wherein each “s” represents a phosphorothioate internucleoside linkage and each “o” represents a phosphodiester internucleoside linkage.

[0558] The nucleobase sequences of SEQ ID Nos: 13, 15, 18, 116, 187, 1604, 1657, 1779, 1809, 1868, 1955, 2079, 2156, 2231, 2304, 2334, 2434, 2531, 2669, 2670, and 2669 are complementary to an equal length portion within nucleobases 19997-20061 of SEQ ID NO: 1.

[0559] The nucleobase sequences of Compound Nos. 1273127, 1273129, 1273132, 1321102, 1321374, 1321458, 1321651, 1321671, 1321717, 1321779, 1321943, 1322460, 1322611, 1322887, 1322962, 1323010, 1323056, 1323090, 1489524, 1489525, 1489527, 1489531, 1489532, 1489533, 1489534, 1489535, 1489536, 1521445, 1521446, 1521447, 1521448, 1521449, 1521593, 1521594, 1521595, 1521596, 1521597, 1521598, 1521599, 1521600, 1521601, 1521602, 1521603, 1521604, 1521608, 1521609, 1521610, 1521611, 1521612, 1521613, 1521614, 1521615, 1521616, 1521617, and 1521618 are complementary to an equal length portion within nucleobases 19997-20061 of SEQ ID NO: 1.

[0560] In certain embodiments, modified oligonucleotides complementary to an equal length portion within nucleobases 19997-20061 of SEQ ID NO: 1 achieve at least 28% reduction of IFNAR1 RNA in vitro in the standard cell assay. In certain embodiments, modified oligonucleotides complementary to an equal length portion within nucleobases 19997-20061 of SEQ ID NO: 1 achieve an average of 65% reduction of IFNAR1 RNA in vitro in the standard cell assay.

### 3. Nucleobases 20076-20133 of SEQ ID NO: 1

[0561] In certain embodiments, nucleobases 20076-20133 of SEQ ID NO: 1 comprise a hotspot region. In certain embodiments, modified oligonucleotides are complementary to an equal length portion within nucleobases 20076-20133 of SEQ ID NO: 1. In certain embodiments, modified oligonucleotides are 16 nucleobases in length, In certain embodiments, modified oligonucleotides are 20 nucleobases in length. In certain embodiments, modified oligonucleotides are gapmers. In certain embodiments, the gapmers are MOE gapmers. In certain embodiments, the gapmers are cEt gapmers. In certain embodiments, the sugar motif for the gapmers are selected from (from 5′ to 3′): eeeeeddddddddddeeeee, eeeeeeddddddddddeeee, and kkkddddddddddkkk; wherein each “d” represents a 2′-β-D-deoxyribosyl sugar moiety, each “e” represents a 2′-MOE sugar moiety, and each “k” represents a cEt modified sugar moiety. In certain embodiments, the nucleosides of the modified oligonucleotides are linked by a combination of phosphodiester and phosphorothioate internucleoside linkages. In certain embodiments, the nucleosides of the modified oligonucleotides are linked by phosphorothioate internucleoside linkages. In certain embodiments, the internucleoside linkage motif for the gapmers is selected from (from 5′ to 3′): sssssssssssssss, sosoossssssssssooss, sossoossssssssssoss, sossossssssssssooss, sosssssssssssssooss, sosooossssssssssoss, sosssossssssssssoss, sooosssssssssssooss, sooosossssssssssoss, sooossssssssssssoss, soooossssssssssooss, soooosssssssssssoss, sooooossssssssssoss, soosossssssssssooss, soossssssssssssooss, soosoossssssssssoss, soossossssssssssoss, soosssssssssssssoss, ssooossssssssssooss, sssoossssssssssooss, ssssossssssssssooss, ssoooossssssssssoss, sssooossssssssssoss, and ssssoossssssssssoss, wherein each “s” represents a phosphorothioate internucleoside linkage and each “o” represents a phosphodiester internucleoside linkage.

[0562] The nucleobase sequences of SEQ ID Nos: 709, 714, 811, 818, 933, 943, 1004, 1017, 1091, 1120, 1240, 1266, 1416, 1424, 2556, 2557, 2664, 2665, 2666, 2667, 2668, and 2682 are complementary to an equal length portion within nucleobases 20076-20133 of SEQ ID NO: 1.

[0563] The nucleobase sequences of Compound Nos. 1320982, 1321049, 1321230, 1321330, 1321817, 1322707, 1322793, 1323059, 1323169, 1323314, 1410683, 1413523, 1413529, 1489455, 1489456, 1489457, 1489458, 1489459, 1489477, 1489478, 1489479, 1489480, 1489481, 1489482, 1489483, 1489484, 1489485, 1489486, and 1489487 are complementary to an equal length portion within nucleobases 20076-20133 of SEQ ID NO: 1.

[0564] In certain embodiments, modified oligonucleotides complementary to an equal length portion within nucleobases 20076-20133 of SEQ ID NO: 1 achieve at least 28% reduction of IFNAR1 RNA in vitro in the standard cell assay. In certain embodiments, modified oligonucleotides complementary to an equal length portion within nucleobases 20076-20133 of SEQ ID NO: 1 achieve an average of 60% reduction of IFNAR1 RNA in vitro in the standard cell assay.

### 4. Nucleobases 20528-20616 of SEQ ID NO: 1

[0565] In certain embodiments, nucleobases 20528-20616 of SEQ ID NO: 1 comprise a hotspot region. In certain embodiments, modified oligonucleotides are complementary to an equal length portion within nucleobases 20528-20616 of SEQ ID NO: 1. In certain embodiments, modified oligonucleotides are 16 nucleobases in length. In certain embodiments, modified oligonucleotides are 20 nucleobases in length. In certain embodiments, modified oligonucleotides are gapmers. In certain embodiments, the gapmers are MOE gapmers. In certain embodiments, the gapmers are cEt gapmers. In certain embodiments, the sugar motif for the gapmers are selected from (from 5′ to 3′): eeeeeddddddddddeeeee, eeeeeeddddddddddeeee, and kkkddddddddddkkk; wherein each “d” represents a 2′-β-D-deoxyribosyl sugar moiety, each “e” represents a 2′-MOE sugar moiety, and each “k” represents a cEt modified sugar moiety. In certain embodiments, the nucleosides of the modified oligonucleotides are linked by a combination of phosphodiester and phosphorothioate internucleoside linkages. In certain embodiments, the nucleosides of the modified oligonucleotides are linked by phosphorothioate internucleoside linkages. In certain embodiments, the internucleoside linkage motif for the gapmers is selected from (from 5′ to 3′): sssssssssssssss, sosoossssssssssooss, sossoossssssssssoss, sossossssssssssooss, sosssssssssssssooss, sosooossssssssssoss, sosssossssssssssoss, sooosssssssssssooss, sooosossssssssssoss, sooossssssssssssoss, soooossssssssssooss, soooosssssssssssoss, sooooossssssssssoss, soosossssssssssooss, soossssssssssssooss, soosoossssssssssoss, soossossssssssssoss, soosssssssssssssoss, ssooossssssssssooss, sssoossssssssssooss, ssssossssssssssooss, ssoooossssssssssoss, sssooossssssssssoss, and ssssoossssssssssoss, wherein each “s” represents a phosphorothioate internucleoside linkage and each “o” represents a phosphodiester internucleoside linkage.

[0566] The nucleobase sequences of SEQ ID Nos: 1952, 1980, 2040, 2069, 2164, 2195, 2272, 2299, 2388, 2641, 2642, 2643, 2644, 2645, 2646, 2683, and 2684 are complementary to an equal length portion within nucleobases 20528-20616 of SEQ ID NO: 1.

[0567] The nucleobase sequences of Compound Nos. 1321408, 1321541, 1321751, 1321878, 1323173, 1323224, 1413519, 1489468, 1489469, 1489471, 1489472, 1489473, 1489474, 1489475, 1489476, 1489488, 1489489, 1489491, 1489493, 1489494, 1489497, 1489498, 1489500, 1489503, 1489505, 1489508, 1521467, 1521468, 1521469, 1521470, 1521471, 1521472, 1521473, and 1521474 are complementary to an equal length portion within nucleobases 20528-20616 of SEQ ID NO: 1.

[0568] In certain embodiments, modified oligonucleotides complementary to an equal length portion within nucleobases 20528-20616 of SEQ ID NO: 1 achieve at least 60% reduction of IFNAR1 RNA in vitro in the standard cell assay. In certain embodiments, modified oligonucleotides complementary to an equal length portion within nucleobases 20528-20616 of SEQ ID NO: 1 achieve an average of 71% reduction of IFNAR1 RNA in vitro in the standard cell assay.

### 5. Nucleobases 22294-22329 of SEQ ID NO: 1

[0569] In certain embodiments, nucleobases 22294-22329 of SEQ ID NO: 1 comprise a hotspot region. In certain embodiments, modified oligonucleotides are complementary to an equal length portion within nucleobases 22294-22329 of SEQ ID NO: 1. In certain embodiments, modified oligonucleotides are 16 nucleobases in length. In certain embodiments, modified oligonucleotides are 20 nucleobases in length. In certain embodiments, modified oligonucleotides are gapmers. In certain embodiments, the gapmers are MOE gapmers. In certain embodiments, the gapmers are cEt gapmers. In certain embodiments, the sugar motif for the gapmers are selected from (from 5′ to 3′): eeeeeddddddddddeeeee, eeeeeeddddddddddeeee, and kkkddddddddddkkk; wherein each “d” represents a 2′-β-D-deoxyribosyl sugar moiety, each “e” represents a 2′-MOE sugar moiety, and each “k” represents a cEt modified sugar moiety. In certain embodiments, the nucleosides of the modified oligonucleotides are linked by a combination of phosphodiester and phosphorothioate internucleoside linkages. In certain embodiments, the nucleosides of the modified oligonucleotides are linked by phosphorothioate internucleoside linkages. In certain embodiments, the internucleoside linkage motif for the gapmers is selected from (from 5′ to 3′): sssssssssssssss, sosoossssssssssooss, sossoossssssssssoss, sossossssssssssooss, sosssssssssssssooss, sosooossssssssssoss, sosssossssssssssoss, sooosssssssssssooss, sooosossssssssssoss, sooossssssssssssoss, soooossssssssssooss, soooosssssssssssoss, sooooossssssssssoss, soosossssssssssooss, soossssssssssssooss, soosoossssssssssoss, soossossssssssssoss, soosssssssssssssoss, ssooossssssssssooss, sssoossssssssssooss, ssssossssssssssooss, ssoooossssssssssoss, sssooossssssssssoss, and ssssoossssssssssoss, wherein each “s” represents a phosphorothioate internucleoside linkage and each “o” represents a phosphodiester internucleoside linkage.

[0570] The nucleobase sequences of SEQ ID Nos: 440, 525, 607, 677, 783, and 850 are complementary to an equal length portion within nucleobases 22294-22329 of SEQ ID NO: 1.

[0571] The nucleobase sequences of Compound Nos. 1322270, 1322424, 1322428, 1322725, 1322905, and 1323347 are complementary to an equal length portion within nucleobases 22294-22329 of SEQ ID NO: 1.

[0572] In certain embodiments, modified oligonucleotides complementary to an equal length portion within nucleobases 22294-22329 of SEQ ID NO: 1 achieve at least 65% reduction of IFNAR1 RNA in vitro in the standard cell assay. In certain embodiments, modified oligonucleotides complementary to an equal length portion within nucleobases 22294-22329 of SEQ ID NO: 1 achieve an average of 84% reduction of IFNAR1 RNA in vitro in the standard cell assay.

### 6. Nucleobases 22453-22476 of SEQ ID NO: 1

[0573] In certain embodiments, nucleobases 22453-22476 of SEQ ID NO: 1 comprise a hotspot region. In certain embodiments, modified oligonucleotides are complementary to an equal length portion within nucleobases 22453-22476 of SEQ ID NO: 1. In certain embodiments, modified oligonucleotides are 16 nucleobases in length. In certain embodiments, modified oligonucleotides are 20 nucleobases in length. In certain embodiments, modified oligonucleotides are gapmers. In certain embodiments, the gapmers are MOE gapmers. In certain embodiments, the gapmers are cEt gapmers. In certain embodiments, the sugar motif for the gapmers are selected from (from 5′ to 3′): eeeeeddddddddddeeeee, eeeeeeddddddddddeeee, and kkkddddddddddkkk; wherein each “d” represents a 2′-β-D-deoxyribosyl sugar moiety, each “e” represents a 2′-MOE sugar moiety, and each “k” represents a cEt modified sugar moiety. In certain embodiments, the nucleosides of the modified oligonucleotides are linked by a combination of phosphodiester and phosphorothioate internucleoside linkages. In certain embodiments, the nucleosides of the modified oligonucleotides are linked by phosphorothioate internucleoside linkages. In certain embodiments, the internucleoside linkage motif for the gapmers is selected from (from 5′ to 3′): sssssssssssssss, sosoossssssssssooss, sossoossssssssssoss, sossossssssssssooss, sosssssssssssssooss, sosooossssssssssoss, sosssossssssssssoss, sooosssssssssssooss, sooosossssssssssoss, sooossssssssssssoss, soooossssssssssooss, soooosssssssssssoss, sooooossssssssssoss, soosossssssssssooss, soossssssssssssooss, soosoossssssssssoss, soossossssssssssoss, soosssssssssssssoss, ssooossssssssssooss, sssoossssssssssooss, ssssossssssssssooss, ssoooossssssssssoss, sssooossssssssssoss, and ssssoossssssssssoss, wherein each “s” represents a phosphorothioate internucleoside linkage and each “o” represents a phosphodiester internucleoside linkage.

[0574] The nucleobase sequences of SEQ ID Nos: 1210, 1317, 1366, 1449, and 2679 are complementary to an equal length portion within nucleobases 22453-22476 of SEQ ID NO: 1.

[0575] The nucleobase sequences of Compound Nos. 1322169, 1322319, 1322497, 1323084, 1492069, 1492128, 1492129, 1492130, 1492131, 1492132, 1521478, 1521479, 1521480, 1521481, 1521482, 1521483, 1521484, 1521485, 1521486, 1521487, 1521488, and 1521489 are complementary to an equal length portion within nucleobases 22453-22476 of SEQ ID NO: 1.

[0576] In certain embodiments, modified oligonucleotides complementary to an equal length portion within nucleobases 22453-22476 of SEQ ID NO: 1 achieve at least 42% reduction of IFNAR1 RNA in vitro in the standard cell assay. In certain embodiments, modified oligonucleotides complementary to an equal length portion within nucleobases 22453-22476 of SEQ ID NO: 1 achieve an average of 56% reduction of IFNAR1 RNA in vitro in the standard cell assay.

### 7. Nucleobases 22595-22626 of SEQ ID NO: 1

[0577] In certain embodiments, nucleobases 22595-22626 of SEQ ID NO: 1 comprise a hotspot region. In certain embodiments, modified oligonucleotides are complementary to an equal length portion within nucleobases 22595-22626 of SEQ ID NO: 1. In certain embodiments, modified oligonucleotides are 16 nucleobases in length. In certain embodiments, modified oligonucleotides are 20 nucleobases in length. In certain embodiments, modified oligonucleotides are gapmers. In certain embodiments, the gapmers are MOE gapmers. In certain embodiments, the gapmers are cEt gapmers. In certain embodiments, the sugar motif for the gapmers are selected from (from 5′ to 3′): eeeeeddddddddddeeeee, eeeeeeddddddddddeeee, and kkkddddddddddkkk; wherein each “d” represents a 2′-β-D-deoxyribosyl sugar moiety, each “e” represents a 2′-MOE sugar moiety, and each “k” represents a cEt modified sugar moiety. In certain embodiments, the nucleosides of the modified oligonucleotides are linked by a combination of phosphodiester and phosphorothioate internucleoside linkages. In certain embodiments, the nucleosides of the modified oligonucleotides are linked by phosphorothioate internucleoside linkages. In certain embodiments, the internucleoside linkage motif for the gapmers is selected from (from 5′ to 3′): sssssssssssssss, sosoossssssssssooss, sossoossssssssssoss, sossossssssssssooss, sosssssssssssssooss, sosooossssssssssoss, sosssossssssssssoss, sooosssssssssssooss, sooosossssssssssoss, sooossssssssssssoss, soooossssssssssooss, soooosssssssssssoss, sooooossssssssssoss, soosossssssssssooss, soossssssssssssooss, soosoossssssssssoss, soossossssssssssoss, soosssssssssssssoss, ssooossssssssssooss, sssoossssssssssooss, ssssossssssssssooss, ssoooossssssssssoss, sssooossssssssssoss, and ssssoossssssssssoss, wherein each “s” represents a phosphorothioate internucleoside linkage and each “o” represents a phosphodiester internucleoside linkage.

[0578] The nucleobase sequences of SEQ ID Nos: 22, 1985, 2059, 2157, 2199, and 2574 are complementary to an equal length portion within nucleobases 22595-22626 of SEQ ID NO: 1.

[0579] The nucleobase sequences of Compound Nos. 1273136, 1322165, 1322183, 1322197, 1323110, 1413580, and 1413741 are complementary to an equal length portion within nucleobases 22595-22626 of SEQ ID NO: 1.

[0580] In certain embodiments, modified oligonucleotides complementary to an equal length portion within nucleobases 22595-22626 of SEQ ID NO: 1 achieve at least 66% reduction of IFNAR1 RNA in vitro in the standard cell assay. In certain embodiments, modified oligonucleotides complementary to an equal length portion within nucleobases 22595-22626 of SEQ ID NO: 1 achieve an average of 85% reduction of IFNAR1 RNA in vitro in the standard cell assay.

### 8. Nucleobases 25530-25565 of SEQ ID NO: 1

[0581] In certain embodiments, nucleobases 25530-25565 of SEQ ID NO: 1 comprise a hotspot region. In certain embodiments, modified oligonucleotides are complementary to an equal length portion within nucleobases 25530-25565 of SEQ ID NO: 1. In certain embodiments, modified oligonucleotides are 16 nucleobases in length. In certain embodiments, modified oligonucleotides are 20 nucleobases in length. In certain embodiments, modified oligonucleotides are gapmers. In certain embodiments, the gapmers are MOE gapmers. In certain embodiments, the gapmers are cEt gapmers. In certain embodiments, the sugar motif for the gapmers are selected from (from 5′ to 3′): eeeeeddddddddddeeeee, eeeeeeddddddddddeeee, and kkkddddddddddkkk; wherein each “d” represents a 2′-β-D-deoxyribosyl sugar moiety, each “e” represents a 2′-MOE sugar moiety, and each “k” represents a cEt modified sugar moiety. In certain embodiments, the nucleosides of the modified oligonucleotides are linked by a combination of phosphodiester and phosphorothioate internucleoside linkages. In certain embodiments, the nucleosides of the modified oligonucleotides are linked by phosphorothioate internucleoside linkages. In certain embodiments, the internucleoside linkage motif for the gapmers is selected from (from 5′ to 3′): sssssssssssssss, sosoossssssssssooss, sossoossssssssssoss, sossossssssssssooss, sosssssssssssssooss, sosooossssssssssoss, sosssossssssssssoss, sooosssssssssssooss, sooosossssssssssoss, sooossssssssssssoss, soooossssssssssooss, soooosssssssssssoss, sooooossssssssssoss, soosossssssssssooss, soossssssssssssooss, soosoossssssssssoss, soossossssssssssoss, soosssssssssssssoss, ssooossssssssssooss, sssoossssssssssooss, ssssossssssssssooss, ssoooossssssssssoss, sssooossssssssssoss, and ssssoossssssssssoss, wherein each “s” represents a phosphorothioate internucleoside linkage and each “o” represents a phosphodiester internucleoside linkage.

[0582] The nucleobase sequences of SEQ ID Nos: 67, 71, 1836, 1887, 1980, 2029, 2115, 2242, 2253, and 2394 are complementary to an equal length portion within nucleobases 25530-25565 of SEQ ID NO: 1.

[0583] The nucleobase sequences of Compound Nos. 1273181, 1273185, 1321177, 1321321, 1321687, 1321737, 1322093, 1322468, 1322976, 1323187, and 1413682 are complementary to an equal length portion within nucleobases 25530-25565 of SEQ ID NO: 1.

[0584] In certain embodiments, modified oligonucleotides complementary to an equal length portion within nucleobases 25530-25565 of SEQ ID NO: 1 achieve at least 33% reduction of IFNAR1 RNA in vitro in the standard cell assay. In certain embodiments, modified oligonucleotides complementary to an equal length portion within nucleobases 25530-25565 of SEQ ID NO: 1 achieve an average of 72% reduction of IFNAR1 RNA in vitro in the standard cell assay.

### 9. Nucleobases 25606-25652 of SEQ ID NO: 1

[0585] In certain embodiments, nucleobases 25606-25652 of SEQ ID NO: 1 comprise a hotspot region. In certain embodiments, modified oligonucleotides are complementary to an equal length portion within nucleobases 25606-25652 of SEQ ID NO: 1. In certain embodiments, modified oligonucleotides are 16 nucleobases in length. In certain embodiments, modified oligonucleotides are 20 nucleobases in length. In certain embodiments, modified oligonucleotides are gapmers. In certain embodiments, the gapmers are MOE gapmers. In certain embodiments, the gapmers are cEt gapmers. In certain embodiments, the sugar motif for the gapmers are selected from (from 5′ to 3′): eeeeeddddddddddeeeee, eeeeeeddddddddddeeee, and kkkddddddddddkkk; wherein each “d” represents a 2′-β-D-deoxyribosyl sugar moiety, each “e” represents a 2′-MOE sugar moiety, and each “k” represents a cEt modified sugar moiety. In certain embodiments, the nucleosides of the modified oligonucleotides are linked by a combination of phosphodiester and phosphorothioate internucleoside linkages. In certain embodiments, the nucleosides of the modified oligonucleotides are linked by phosphorothioate internucleoside linkages. In certain embodiments, the internucleoside linkage motif for the gapmers is selected from (from 5′ to 3′): sssssssssssssss, sosoossssssssssooss, sossoossssssssssoss, sossossssssssssooss, sosssssssssssssooss, sosooossssssssssoss, sosssossssssssssoss, sooosssssssssssooss, sooosossssssssssoss, sooossssssssssssoss, soooossssssssssooss, soooosssssssssssoss, sooooossssssssssoss, soosossssssssssooss, soossssssssssssooss, soosoossssssssssoss, soossossssssssssoss, soosssssssssssssoss, ssooossssssssssooss, sssoossssssssssooss, ssssossssssssssooss, ssoooossssssssssoss, sssooossssssssssoss, and ssssoossssssssssoss, wherein each “s” represents a phosphorothioate internucleoside linkage and each “o” represents a phosphodiester internucleoside linkage.

[0586] The nucleobase sequences of SEQ ID Nos: 201, 287, 341, 415, 547, 587, 676, 754, 2659, 2660, 2661, 2662, 2663, and 2687 are complementary to an equal length portion within nucleobases 25606-25652 of SEQ ID NO: 1.

[0587] The nucleobase sequences of Compound Nos. 1321332, 1321475, 1322045, 1322057, 1322202, 1322364, 1322670, 1323172, 1413742, 1489461, 1489462, 1489463, 1489464, 1489467, 1489513, 1489514, 1489515, 1489516, 1489517, 1489518, 1489519, 1489520, 1492087, 1492088, 1492089, 1492090, 1492091, 1492092, 1492136, 1492137, 1492138, 1492139, 1492140, 1492141, 1492142, 1492143, 1521502, 1521503, 1521504, 1521505, 1521506, 1521507, 1521508, 1521509, 1521510, 1521511, and 1521512 are complementary to an equal length portion within nucleobases 25606-25652 of SEQ ID NO: 1.

[0588] In certain embodiments, modified oligonucleotides complementary to an equal length portion within nucleobases 25606-25652 of SEQ ID NO: 1 achieve at least 56% reduction of IFNAR1 RNA in vitro in the standard cell assay. In certain embodiments, modified oligonucleotides complementary to an equal length portion within nucleobases 25606-25652 of SEQ ID NO: 1 achieve an average of 72% reduction of IFNAR1 RNA in vitro in the standard cell assay.

### 10. Nucleobases 25710-25767 of SEQ ID NO: 1

[0589] In certain embodiments, nucleobases 25710-25767 of SEQ ID NO: 1 comprise a hotspot region. In certain embodiments, modified oligonucleotides are complementary to an equal length portion within nucleobases 25710-25767 of SEQ ID NO: 1. In certain embodiments, modified oligonucleotides are 16 nucleobases in length. In certain embodiments, modified oligonucleotides are 20 nucleobases in length. In certain embodiments, modified oligonucleotides are gapmers. In certain embodiments, the gapmers are MOE gapmers. In certain embodiments, the gapmers are cEt gapmers. In certain embodiments, the sugar motif for the gapmers are selected from (from 5′ to 3′): eeeeeddddddddddeeeee, eeeeeeddddddddddeeee, and kkkddddddddddkkk; wherein each “d” represents a 2′-β-D-deoxyribosyl sugar moiety, each “e” represents a 2′-MOE sugar moiety, and each “k” represents a cEt modified sugar moiety. In certain embodiments, the nucleosides of the modified oligonucleotides are linked by a combination of phosphodiester and phosphorothioate internucleoside linkages. In certain embodiments, the nucleosides of the modified oligonucleotides are linked by phosphorothioate internucleoside linkages. In certain embodiments, the internucleoside linkage motif for the gapmers is selected from (from 5′ to 3′): sssssssssssssss, sosoossssssssssooss, sossoossssssssssoss, sossossssssssssooss, sosssssssssssssooss, sosooossssssssssoss, sosssossssssssssoss, sooosssssssssssooss, sooosossssssssssoss, sooossssssssssssoss, soooossssssssssooss, soooosssssssssssoss, sooooossssssssssoss, soosossssssssssooss, soossssssssssssooss, soosoossssssssssoss, soossossssssssssoss, soosssssssssssssoss, ssooossssssssssooss, sssoossssssssssooss, ssssossssssssssooss, ssoooossssssssssoss, sssooossssssssssoss, and ssssoossssssssssoss, wherein each “s” represents a phosphorothioate internucleoside linkage and each “o” represents a phosphodiester internucleoside linkage.

[0590] The nucleobase sequences of SEQ ID Nos: 139, 229, 275, 369, 468, 540, 581, 691, 773, 790, 900, 1013, 1024, and 2566 are complementary to an equal length portion within nucleobases 25710-25767 of SEQ ID NO: 1.

[0591] The nucleobase sequences of Compound Nos. 1321062, 1321192, 1321571, 1322116, 1322170, 1322334, 1322395, 1322997, 1323021, 1323043, 1323098, 1323219, 1323315, and 1413560 are complementary to an equal length portion within nucleobases 25710-25767 of SEQ ID NO: 1.

[0592] In certain embodiments, modified oligonucleotides complementary to an equal length portion within nucleobases 25710-25767 of SEQ ID NO: 1 achieve at least 40% reduction of IFNAR1 RNA in vitro in the standard cell assay. In certain embodiments, modified oligonucleotides complementary to an equal length portion within nucleobases 25710-25767 of SEQ ID NO: 1 achieve an average of 58% reduction of IFNAR1 RNA in vitro in the standard cell assay.

### 11. Nucleobases 25768-25827 of SEQ ID NO: 1

[0593] In certain embodiments, nucleobases 25768-25827 of SEQ ID NO: 1 comprise a hotspot region. In certain embodiments, modified oligonucleotides are complementary to an equal length portion within nucleobases 25768-25827 of SEQ ID NO: 1. In certain embodiments, modified oligonucleotides are 16 nucleobases in length. In certain embodiments, modified oligonucleotides are 20 nucleobases in length. In certain embodiments, modified oligonucleotides are gapmers. In certain embodiments, the gapmers are MOE gapmers. In certain embodiments, the gapmers are cEt gapmers. In certain embodiments, the sugar motif for the gapmers are selected from (from 5′ to 3′): eeeeeddddddddddeeeee, eeeeeeddddddddddeeee, and kkkddddddddddkkk; wherein each “d” represents a 2′-β-D-deoxyribosyl sugar moiety, each “e” represents a 2′-MOE sugar moiety, and each “k” represents a cEt modified sugar moiety. In certain embodiments, the nucleosides of the modified oligonucleotides are linked by a combination of phosphodiester and phosphorothioate internucleoside linkages. In certain embodiments, the nucleosides of the modified oligonucleotides are linked by phosphorothioate internucleoside linkages. In certain embodiments, the internucleoside linkage motif for the gapmers is selected from (from 5′ to 3′): sssssssssssssss, sosoossssssssssooss, sossoossssssssssoss, sossossssssssssooss, sosssssssssssssooss, sosooossssssssssoss, sosssossssssssssoss, sooosssssssssssooss, sooosossssssssssoss, sooossssssssssssoss, soooossssssssssooss, soooosssssssssssoss, sooooossssssssssoss, soosossssssssssooss, soossssssssssssooss, soosoossssssssssoss, soossossssssssssoss, soosssssssssssssoss, ssooossssssssssooss, sssoossssssssssooss, ssssossssssssssooss, ssoooossssssssssoss, sssooossssssssssoss, and ssssoossssssssssoss, wherein each “s” represents a phosphorothioate internucleoside linkage and each “o” represents a phosphodiester internucleoside linkage.

[0594] The nucleobase sequences of SEQ ID Nos: 80, 450, 532, 559, 643, 772, 842, 895, 1008, 1065, 1111, 1200, 1247, 1377, and 2637 are complementary to an equal length portion within nucleobases 25768-25827 of SEQ ID NO: 1.

[0595] The nucleobase sequences of Compound Nos. 1273194, 1320923, 1321145, 1321191, 1321349, 1322005, 1322080, 1322271, 1322466, 1322718, 1322758, 1322795, 1323037, 1323165, 1413692, and 1413738 are complementary to an equal length portion within nucleobases 25768-25827 of SEQ ID NO: 1.

[0596] In certain embodiments, modified oligonucleotides complementary to an equal length portion within nucleobases 25768-25827 of SEQ ID NO: 1 achieve at least 37% reduction of IFNAR1 RNA in vitro in the standard cell assay. In certain embodiments, modified oligonucleotides complementary to an equal length portion within nucleobases 25768-25827 of SEQ ID NO: 1 achieve an average of 55% reduction of IFNAR1 RNA in vitro in the standard cell assay.

### 12. Nucleobases 28421-28468 of SEQ ID NO: 1

[0597] In certain embodiments, nucleobases 28421-28468 of SEQ ID NO: 1 comprise a hotspot region. In certain embodiments, modified oligonucleotides are complementary to an equal length portion within nucleobases 28421-28468 of SEQ ID NO: 1. In certain embodiments, modified oligonucleotides are 16 nucleobases in length. In certain embodiments, modified oligonucleotides are 20 nucleobases in length. In certain embodiments, modified oligonucleotides are gapmers. In certain embodiments, the gapmers are MOE gapmers. In certain embodiments, the gapmers are cEt gapmers. In certain embodiments, the sugar motif for the gapmers are selected from (from 5′ to 3′): eeeeeddddddddddeeeee, eeeeeeddddddddddeeee, and kkkddddddddddkkk; wherein each “d” represents a 2′-β-D-deoxyribosyl sugar moiety, each “e” represents a 2′-MOE sugar moiety, and each “k” represents a cEt modified sugar moiety. In certain embodiments, the nucleosides of the modified oligonucleotides are linked by a combination of phosphodiester and phosphorothioate internucleoside linkages. In certain embodiments, the nucleosides of the modified oligonucleotides are linked by phosphorothioate internucleoside linkages. In certain embodiments, the internucleoside linkage motif for the gapmers is selected from (from 5′ to 3′): sssssssssssssss, sosoossssssssssooss, sossoossssssssssoss, sossossssssssssooss, sosssssssssssssooss, sosooossssssssssoss, sosssossssssssssoss, sooosssssssssssooss, sooosossssssssssoss, sooossssssssssssoss, soooossssssssssooss, soooosssssssssssoss, sooooossssssssssoss, soosossssssssssooss, soossssssssssssooss, soosoossssssssssoss, soossossssssssssoss, soosssssssssssssoss, ssooossssssssssooss, sssoossssssssssooss, ssssossssssssssooss, ssoooossssssssssoss, sssooossssssssssoss, and ssssoossssssssssoss, wherein each “s” represents a phosphorothioate internucleoside linkage and each “o” represents a phosphodiester internucleoside linkage.

[0598] The nucleobase sequences of SEQ ID Nos: 21, 30, 33, 449, 522, 617, and 660 are complementary to an equal length portion within nucleobases 28421-28468 of SEQ ID NO: 1.

[0599] The nucleobase sequences of Compound Nos. 1273135, 1273144, 1273147, 1321713, 1322321, 1322724, and 1322933 are complementary to an equal length portion within nucleobases 28421-28468 of SEQ ID NO: 1.

[0600] In certain embodiments, modified oligonucleotides complementary to an equal length portion within nucleobases 28421-28468 of SEQ ID NO: 1 achieve at least 65% reduction of IFNAR1 RNA in vitro in the standard cell assay. In certain embodiments, modified oligonucleotides complementary to an equal length portion within nucleobases 28421-28468 of SEQ ID NO: 1 achieve an average of 86% reduction of IFNAR1 RNA in vitro in the standard cell assay.

### 13. Nucleobases 29924-29949 of SEQ ID NO: 1

[0601] In certain embodiments, nucleobases 29924-29949 of SEQ ID NO: 1 comprise a hotspot region. In certain embodiments, modified oligonucleotides are complementary to an equal length portion within nucleobases 29924-29949 of SEQ ID NO: 1. In certain embodiments, modified oligonucleotides are 16 nucleobases in length. In certain embodiments, modified oligonucleotides are 20 nucleobases in length. In certain embodiments, modified oligonucleotides are gapmers. In certain embodiments, the gapmers are MOE gapmers. In certain embodiments, the gapmers are cEt gapmers. In certain embodiments, the sugar motif for the gapmers are selected from (from 5′ to 3′): eeeeeddddddddddeeeee, eeeeeeddddddddddeeee, and kkkddddddddddkkk; wherein each “d” represents a 2′-β-D-deoxyribosyl sugar moiety, each “e” represents a 2′-MOE sugar moiety, and each “k” represents a cEt modified sugar moiety. In certain embodiments, the nucleosides of the modified oligonucleotides are linked by a combination of phosphodiester and phosphorothioate internucleoside linkages. In certain embodiments, the nucleosides of the modified oligonucleotides are linked by phosphorothioate internucleoside linkages. In certain embodiments, the internucleoside linkage motif for the gapmers is selected from (from 5′ to 3′): sssssssssssssss, sosoossssssssssooss, sossoossssssssssoss, sossossssssssssooss, sosssssssssssssooss, sosooossssssssssoss, sosssossssssssssoss, sooosssssssssssooss, sooosossssssssssoss, sooossssssssssssoss, soooossssssssssooss, soooosssssssssssoss, sooooossssssssssoss, soosossssssssssooss, soossssssssssssooss, soosoossssssssssoss, soossossssssssssoss, soosssssssssssssoss, ssooossssssssssooss, sssoossssssssssooss, ssssossssssssssooss, ssoooossssssssssoss, sssooossssssssssoss, and ssssoossssssssssoss, wherein each “s” represents a phosphorothioate internucleoside linkage and each “o” represents a phosphodiester internucleoside linkage.

[0602] The nucleobase sequences of SEQ ID Nos: 78, 693, 759, 799, and 875 are complementary to an equal length portion within nucleobases 29924-29949 of SEQ ID NO: 1.

[0603] The nucleobase sequences of Compound Nos. 1273192, 1321249, 1321440, 1322800, and 1323073 are complementary to an equal length portion within nucleobases 29924-29949 of SEQ ID NO: 1.

[0604] In certain embodiments, modified oligonucleotides complementary to an equal length portion within nucleobases 29924-29949 of SEQ ID NO: 1 achieve at least 69% reduction of IFNAR1 RNA in vitro in the standard cell assay. In certain embodiments, modified oligonucleotides complementary to an equal length portion within nucleobases 29924-29949 of SEQ ID NO: 1 achieve an average of 81% reduction of IFNAR1 RNA in vitro in the standard cell assay.

### 14. Nucleobases 29968-30021 of SEQ ID NO: 1

[0605] In certain embodiments, nucleobases 29968-30021 of SEQ ID NO: 1 comprise a hotspot region. In certain embodiments, modified oligonucleotides are complementary to an equal length portion within nucleobases 29968-30021 of SEQ ID NO: 1. In certain embodiments, modified oligonucleotides are 16 nucleobases in length. In certain embodiments, modified oligonucleotides are 20 nucleobases in length. In certain embodiments, modified oligonucleotides are gapmers. In certain embodiments, the gapmers are MOE gapmers. In certain embodiments, the gapmers are cEt gapmers. In certain embodiments, the sugar motif for the gapmers are selected from (from 5′ to 3′): eeeeeddddddddddeeeee, eeeeeeddddddddddeeee, and kkkddddddddddkkk; wherein each “d” represents a 2′-β-D-deoxyribosyl sugar moiety, each “e” represents a 2′-MOE sugar moiety, and each “k” represents a cEt modified sugar moiety. In certain embodiments, the nucleosides of the modified oligonucleotides are linked by a combination of phosphodiester and phosphorothioate internucleoside linkages. In certain embodiments, the nucleosides of the modified oligonucleotides are linked by phosphorothioate internucleoside linkages. In certain embodiments, the internucleoside linkage motif for the gapmers is selected from (from 5′ to 3′): sssssssssssssss, sosoossssssssssooss, sossoossssssssssoss, sossossssssssssooss, sosssssssssssssooss, sosooossssssssssoss, sosssossssssssssoss, sooosssssssssssooss, sooosossssssssssoss, sooossssssssssssoss, soooossssssssssooss, soooosssssssssssoss, sooooossssssssssoss, soosossssssssssooss, soossssssssssssooss, soosoossssssssssoss, soossossssssssssoss, soosssssssssssssoss, ssooossssssssssooss, sssoossssssssssooss, ssssossssssssssooss, ssoooossssssssssoss, sssooossssssssssoss, and ssssoossssssssssoss, wherein each “s” represents a phosphorothioate internucleoside linkage and each “o” represents a phosphodiester internucleoside linkage.

[0606] The nucleobase sequences of SEQ ID Nos: 1500, 1625, 1677, 1733, 1790, 1896, 1981, 2036, 2106, 2217, 2620, 2625, 2636, 2654, 2655, 2656, 2657, 2658, and 2685 are complementary to an equal length portion within nucleobases 29968-30021 of SEQ ID NO: 1.

[0607] The nucleobase sequences of Compound Nos. 1321074, 1321328, 1321462, 1321599, 1321700, 1321967, 1322094, 1322252, 1322697, 1323127, 1413685, 1413711, 1413736, 1492051, 1492052, 1492053, 1492054, 1492055, 1492056, 1492074, 1492075, 1492076, 1492077, 1492078, 1492080, 1492081, and 1492082 are complementary to an equal length portion within nucleobases 29968-30021 of SEQ ID NO: 1.

[0608] In certain embodiments, modified oligonucleotides complementary to an equal length portion within nucleobases 29968-30021 of SEQ ID NO: 1 achieve at least 24% reduction of IFNAR1 RNA in vitro in the standard cell assay. In certain embodiments, modified oligonucleotides complementary to an equal length portion within nucleobases 29968-30021 of SEQ ID NO: 1 achieve an average of 68% reduction of IFNAR1 RNA in vitro in the standard cell assay.

### 15. Nucleobases 31072-31096 of SEQ ID NO: 1

[0609] In certain embodiments, nucleobases 31072-31096 of SEQ ID NO: 1 comprise a hotspot region. In certain embodiments, modified oligonucleotides are complementary to an equal length portion within nucleobases 31072-31096 of SEQ ID NO: 1. In certain embodiments, modified oligonucleotides are 16 nucleobases in length. In certain embodiments, modified oligonucleotides are 20 nucleobases in length. In certain embodiments, modified oligonucleotides are gapmers. In certain embodiments, the gapmers are MOE gapmers. In certain embodiments, the gapmers are cEt gapmers. In certain embodiments, the sugar motif for the gapmers are selected from (from 5′ to 3′): eeeeeddddddddddeeeee, eeeeeeddddddddddeeee, and kkkddddddddddkkk; wherein each “d” represents a 2′-β-D-deoxyribosyl sugar moiety, each “e” represents a 2′-MOE sugar moiety, and each “k” represents a cEt modified sugar moiety. In certain embodiments, the nucleosides of the modified oligonucleotides are linked by a combination of phosphodiester and phosphorothioate internucleoside linkages. In certain embodiments, the nucleosides of the modified oligonucleotides are linked by phosphorothioate internucleoside linkages. In certain embodiments, the internucleoside linkage motif for the gapmers is selected from (from 5′ to 3′): sssssssssssssss, sosoossssssssssooss, sossoossssssssssoss, sossossssssssssooss, sosssssssssssssooss, sosooossssssssssoss, sosssossssssssssoss, sooosssssssssssooss, sooosossssssssssoss, sooossssssssssssoss, soooossssssssssooss, soooosssssssssssoss, sooooossssssssssoss, soosossssssssssooss, soossssssssssssooss, soosoossssssssssoss, soossossssssssssoss, soosssssssssssssoss, ssooossssssssssooss, sssoossssssssssooss, ssssossssssssssooss, ssoooossssssssssoss, sssooossssssssssoss, and ssssoossssssssssoss, wherein each “s” represents a phosphorothioate internucleoside linkage and each “o” represents a phosphodiester internucleoside linkage.

[0610] The nucleobase sequences of SEQ ID Nos: 125, 210, 289, 335, 2509, and 2614 are complementary to an equal length portion within nucleobases 31072-31096 of SEQ ID NO: 1.

[0611] The nucleobase sequences of Compound Nos. 1321187, 1321789, 1321877, 1322111, 1322246, 1413598, and 1413666 are complementary to an equal length portion within nucleobases 31072-31096 of SEQ ID NO: 1.

[0612] In certain embodiments, modified oligonucleotides complementary to an equal length portion within nucleobases 31072-31096 of SEQ ID NO: 1 achieve at least 48% reduction of IFNAR1 RNA in vitro in the standard cell assay. In certain embodiments, modified oligonucleotides complementary to an equal length portion within nucleobases 31072-31096 of SEQ ID NO: 1 achieve an average of 77% reduction of IFNAR1 RNA in vitro in the standard cell assay.

### 16. Nucleobases 31792-31837 of SEQ ID NO: 1

[0613] In certain embodiments, nucleobases 31792-31837 of SEQ ID NO: 1 comprise a hotspot region. In certain embodiments, modified oligonucleotides are complementary to an equal length portion within nucleobases 31792-31837 of SEQ ID NO: 1. In certain embodiments, modified oligonucleotides are 16 nucleobases in length. In certain embodiments, modified oligonucleotides are 20 nucleobases in length. In certain embodiments, modified oligonucleotides are gapmers. In certain embodiments, the gapmers are MOE gapmers. In certain embodiments, the gapmers are cEt gapmers. In certain embodiments, the sugar motif for the gapmers are selected from (from 5′ to 3′): eeeeeddddddddddeeeee, eeeeeeddddddddddeeee, and kkkddddddddddkkk; wherein each “d” represents a 2′-β-D-deoxyribosyl sugar moiety, each “e” represents a 2′-MOE sugar moiety, and each “k” represents a cEt modified sugar moiety. In certain embodiments, the nucleosides of the modified oligonucleotides are linked by a combination of phosphodiester and phosphorothioate internucleoside linkages. In certain embodiments, the nucleosides of the modified oligonucleotides are linked by phosphorothioate internucleoside linkages. In certain embodiments, the internucleoside linkage motif for the gapmers is selected from (from 5′ to 3′): sssssssssssssss, sosoossssssssssooss, sossoossssssssssoss, sossossssssssssooss, sosssssssssssssooss, sosooossssssssssoss, sosssossssssssssoss, sooosssssssssssooss, sooosossssssssssoss, sooossssssssssssoss, soooossssssssssooss, soooosssssssssssoss, sooooossssssssssoss, soosossssssssssooss, soossssssssssssooss, soosoossssssssssoss, soossossssssssssoss, soosssssssssssssoss, ssooossssssssssooss, sssoossssssssssooss, ssssossssssssssooss, ssoooossssssssssoss, sssooossssssssssoss, and ssssoossssssssssoss, wherein each “s” represents a phosphorothioate internucleoside linkage and each “o” represents a phosphodiester internucleoside linkage.

[0614] The nucleobase sequences of SEQ ID Nos: 1345, 1452, 1477, 1626, 1685, 1775, 1838, 1866, 2014, and 2083 are complementary to an equal length portion within nucleobases 31792-31837 of SEQ ID NO: 1.

[0615] The nucleobase sequences of Compound Nos. 1320893, 1320952, 1321682, 1322525, 1322590, 1322596, 1322914, 1323167, 1323217, and 1323262 are complementary to an equal length portion within nucleobases 31792-31837 of SEQ ID NO: 1.

[0616] In certain embodiments, modified oligonucleotides complementary to an equal length portion within nucleobases 31792-31837 of SEQ ID NO: 1 achieve at least 41% reduction of IFNAR1 RNA in vitro in the standard cell assay. In certain embodiments, modified oligonucleotides complementary to an equal length portion within nucleobases 31792-31837 of SEQ ID NO: 1 achieve an average of 64% reduction of IFNAR1 RNA in vitro in the standard cell assay.

### 17. Nucleobases 32353-32386 of SEQ ID NO: 1

[0617] In certain embodiments, nucleobases 32353-32386 of SEQ ID NO: 1 comprise a hotspot region. In certain embodiments, modified oligonucleotides are complementary to an equal length portion within nucleobases 32353-32386 of SEQ ID NO: 1. In certain embodiments, modified oligonucleotides are 16 nucleobases in length. In certain embodiments, modified oligonucleotides are 20 nucleobases in length. In certain embodiments, modified oligonucleotides are gapmers. In certain embodiments, the gapmers are MOE gapmers. In certain embodiments, the gapmers are cEt gapmers. In certain embodiments, the sugar motif for the gapmers are selected from (from 5′ to 3′): eeeeeddddddddddeeeee, eeeeeeddddddddddeeee, and kkkddddddddddkkk; wherein each “d” represents a 2′-β-D-deoxyribosyl sugar moiety, each “e” represents a 2′-MOE sugar moiety, and each “k” represents a cEt modified sugar moiety. In certain embodiments, the nucleosides of the modified oligonucleotides are linked by a combination of phosphodiester and phosphorothioate internucleoside linkages. In certain embodiments, the nucleosides of the modified oligonucleotides are linked by phosphorothioate internucleoside linkages. In certain embodiments, the nucleosides of the modified oligonucleotides are linked by phosphorothioate internucleoside linkages. In certain embodiments, the internucleoside linkage motif for the gapmers is selected from (from 5′ to 3′): sssssssssssssss, sosoossssssssssooss, sossoossssssssssoss, sossossssssssssooss, sosssssssssssssooss, sosooossssssssssoss, sosssossssssssssoss, sooosssssssssssooss, sooosossssssssssoss, sooossssssssssssoss, soooossssssssssooss, soooosssssssssssoss, sooooossssssssssoss, soosossssssssssooss, soossssssssssssooss, soosoossssssssssoss, soossossssssssssoss, soosssssssssssssoss, ssooossssssssssooss, sssoossssssssssooss, ssssossssssssssooss, ssoooossssssssssoss, sssooossssssssssoss, and ssssoossssssssssoss, wherein each “s” represents a phosphorothioate internucleoside linkage and each “o” represents a phosphodiester internucleoside linkage.

[0618] The nucleobase sequences of SEQ ID Nos: 99, 2151, 2210, 2320, 2353, 2408, and 2483 are complementary to an equal length portion within nucleobases 32353-32386 of SEQ ID NO: 1.

[0619] The nucleobase sequences of Compound Nos. 1321068, 1321149, 1321172, 1321846, 1322543, 1322832, and 1323273 are complementary to an equal length portion within nucleobases 32353-32386 of SEQ ID NO: 1.

[0620] In certain embodiments, modified oligonucleotides complementary to an equal length portion within nucleobases 32353-32386 of SEQ ID NO: 1 achieve at least 47% reduction of IFNAR1 RNA in vitro in the standard cell assay. In certain embodiments, modified oligonucleotides complementary to an equal length portion within nucleobases 32353-32386 of SEQ ID NO: 1 achieve an average of 64% reduction of IFNAR1 RNA in vitro in the standard cell assay.

### 18. Nucleobases 35016-35042 of SEQ ID NO: 1

[0621] In certain embodiments, nucleobases 35016-35042 of SEQ ID NO: 1 comprise a hotspot region. In certain embodiments, modified oligonucleotides are complementary to an equal length portion within nucleobases 35016-35042 of SEQ ID NO: 1. In certain embodiments, modified oligonucleotides are 16 nucleobases in length. In certain embodiments, modified oligonucleotides are 20 nucleobases in length. In certain embodiments, modified oligonucleotides are gapmers. In certain embodiments, the gapmers are MOE gapmers. In certain embodiments, the gapmers are cEt gapmers. In certain embodiments, the sugar motif for the gapmers are selected from (from 5′ to 3′): eeeeeddddddddddeeeee, eeeeeeddddddddddeeee, and kkkddddddddddkkk; wherein each “d” represents a 2′-β-D-deoxyribosyl sugar moiety, each “e” represents a 2′-MOE sugar moiety, and each “k” represents a cEt modified sugar moiety. In certain embodiments, the nucleosides of the modified oligonucleotides are linked by a combination of phosphodiester and phosphorothioate internucleoside linkages. In certain embodiments, the nucleosides of the modified oligonucleotides are linked by phosphorothioate internucleoside linkages. In certain embodiments, the internucleoside linkage motif for the gapmers is selected from (from 5′ to 3′): sssssssssssssss, sosoossssssssssooss, sossoossssssssssoss, sossossssssssssooss, sosssssssssssssooss, sosooossssssssssoss, sosssossssssssssoss, sooosssssssssssooss, sooosossssssssssoss, sooossssssssssssoss, soooossssssssssooss, soooosssssssssssoss, sooooossssssssssoss, soosossssssssssooss, soossssssssssssooss, soosoossssssssssoss, soossossssssssssoss, soosssssssssssssoss, ssooossssssssssooss, sssoossssssssssooss, ssssossssssssssooss, ssoooossssssssssoss, sssooossssssssssoss, and ssssoossssssssssoss, wherein each “s” represents a phosphorothioate internucleoside linkage and each “o” represents a phosphodiester internucleoside linkage.

[0622] The nucleobase sequences of SEQ ID Nos: 1814, 1933, 1962, 2056, 2130, and 2237 are complementary to an equal length portion within nucleobases 35016-35042 of SEQ ID NO: 1.

[0623] The nucleobase sequences of Compound Nos. 1321729, 1321882, 1322128, 1322345, 1323017, 1323097, and 1413535 are complementary to an equal length portion within nucleobases 35016-35042 of SEQ ID NO: 1.

[0624] In certain embodiments, modified oligonucleotides complementary to an equal length portion within nucleobases 35016-35042 of SEQ ID NO: 1 achieve at least 72% reduction of IFNAR1 RNA in vitro in the standard cell assay. In certain embodiments, modified oligonucleotides complementary to an equal length portion within nucleobases 35016-35042 of SEQ ID NO: 1 achieve an average of 83% reduction of IFNAR1 RNA in vitro in the standard cell assay.

### NONLIMITING DISCLOSURE AND INCORPORATION BY REFERENCE

[0625] Each of the literature and patent publications listed herein is incorporated by reference in its entirety.

[0626] While certain compounds, compositions and methods described herein have been described with specificity in accordance with certain embodiments, the following examples serve only to illustrate the compounds described herein and are not intended to limit the same. Each of the references, GenBank accession numbers, ENSEMBL identifiers, and the like recited in the present application is incorporated herein by reference in its entirety.

[0627] Although the sequence listing accompanying this filing identifies each sequence as either “RNA” or “DNA” as required, in reality, those sequences may be modified with any combination of chemical modifications. One of skill in the art will readily appreciate that such designation as “RNA” or “DNA” to describe modified oligonucleotides is, in certain instances, arbitrary. For example, an oligonucleotide comprising a nucleoside comprising a 2′-OH sugar moiety and a thymine base could be described as a DNA having a modified sugar (2′-OH in place of one 2′-H of DNA) or as an RNA having a modified base (thymine (methylated uracil) in place of an uracil of RNA). Accordingly, nucleic acid sequences provided herein, including, but not limited to those in the sequence listing, are intended to encompass nucleic acids containing any combination of natural or modified RNA and/or DNA, including, but not limited to such nucleic acids having modified nucleobases. By way of further example and without limitation, an oligomeric compound having the nucleobase sequence “ATCGATCG” encompasses any oligomeric compounds having such nucleobase sequence, whether modified or unmodified, including, but not limited to, such compounds comprising RNA bases, such as those having sequence “AUCGAUCG” and those having some DNA bases and some RNA bases such as “AUCGATCG” and oligomeric compounds having other modified nucleobases, such as “AT^{m}CGAUCG,” wherein ^{m}C indicates a cytosine base comprising a methyl group at the 5-position.

[0628] Certain compounds described herein (e.g., modified oligonucleotides) have one or more asymmetric center and thus give rise to enantiomers, diastereomers, and other stereoisomeric configurations that may be defined, in terms of absolute stereochemistry, as (R) or (S), as α or β such as for sugar anomers, or as (D) or (L), such as for amino acids, etc. Compounds provided herein that are drawn or described as having certain stereoisomeric configurations include only the indicated compounds. Compounds provided herein that are drawn or described with undefined stereochemistry include all such possible isomers, including their stereorandom and optically pure forms, unless specified otherwise. Likewise, tautomeric forms of the compounds herein are also included unless otherwise indicated. Unless otherwise indicated, compounds described herein are intended to include corresponding salt forms.

[0629] The compounds described herein include variations in which one or more atoms are replaced with a non-radioactive isotope or radioactive isotope of the indicated element. For example, compounds herein that comprise hydrogen atoms encompass all possible deuterium substitutions for each of the ¹H hydrogen atoms. Isotopic substitutions encompassed by the compounds herein include but are not limited to: ²H or ³H in place of ¹H, ¹³C or ¹⁴C in place of ²C, ¹⁵N in place of ¹⁴N, ¹⁷O or ¹⁸O in place of ¹⁶O, and ³³S, ³⁴S, ³⁵S, or ³⁶S in place of ³²S. In certain embodiments, non-radioactive isotopic substitutions may impart new properties on the oligomeric compound that are beneficial for use as a therapeutic or research tool. In certain embodiments, radioactive isotopic substitutions may make the compound suitable for research or diagnostic purposes such as imaging.

### EXAMPLES

[0630] The following examples illustrate certain embodiments of the present disclosure and are not limiting.

[0631] Moreover, where specific embodiments are provided, the inventors have contemplated generic application of those specific embodiments. For example, disclosure of an oligonucleotide having a particular motif provides reasonable support for additional oligonucleotides having the same or similar motif. And, for example, where a particular high-affinity modification appears at a particular position, other high-affinity modifications at the same position are considered suitable, unless otherwise indicated.

### Example 1: Effect of 3-10-3 cEt Full Phosphorothioate Modified Oligonucleotides on Human IFNAR1 RNA In Vitro, Single Dose

[0632] Modified oligonucleotides complementary to human IFNAR1 nucleic acid were designed and tested for their single dose effects on IFNAR1 RNA in vitro.

[0633] The modified oligonucleotides in the table below are 3-10-3 cEt gapmers with full phosphorothioate internucleoside linkages. The gapmers are 16 nucleosides in length, wherein the sugar motif for the gapmers is (from 5′ to 3′) kkkddddddddddkkk; wherein each “d” represents a 2′-β-D-deoxyribosyl sugar moiety, and each “k” represents a cEt sugar moiety. The internucleoside linkage motif for the gapmers is (from 5′ to 3′) sssssssssssssss; wherein each “s” represents a phosphorothioate internucleoside linkage. Each cytosine residue is a 5-methyl cytosine.

[0634] “Start site” indicates the 5′-most nucleoside to which the modified oligonucleotide is complementary in the target nucleic acid sequence. “Stop site” indicates the 3′-most nucleoside to which the modified oligonucleotide is complementary in the target nucleic acid sequence. Each modified oligonucleotide listed in the tables below is 100% complementary to SEQ ID NO 1 (GENBANK Accession No. NC_000021.9, truncated from 33321001 to 33363000), to SEQ ID NO 2 (GENBANK Accession No. NM_000629.2), or to both. ‘N/A’ indicates that the modified oligonucleotide is not 100% complementary to that particular target nucleic acid sequence.

[0635] Cultured A431 cells were treated with modified oligonucleotide at a concentration of 2000 nM by free uptake at a density of 10,000 cells per well. After a treatment period of approximately 48 hours, total RNA was isolated from the cells and IFNAR1 RNA levels were measured by quantitative real-time RTPCR. IFNAR1 RNA levels were measured by human IFNAR1 primer probe set RTS44352 (forward sequence CTTTCAAGTTCAGTGGCTCCA, designated herein as SEQ ID NO 6; reverse sequence CGTTTTGAGGAAAGACACACTG, designated herein as SEQ ID NO 7; probe sequence AGTTTTGACATTTTCACAGTCAGGTATTTGTTTCC, designated herein as SEQ ID NO 8). IFNAR1 RNA levels were normalized to total RNA content, as measured by RIBOGREEN®. Reduction of IFNAR1 RNA is presented in the tables below as percent IFNAR1 RNA relative to the amount in untreated control cells (% UTC). Each table represents results from an individual assay plate. The values marked with a “?” indicate that the modified oligonucleotide is complementary to the amplicon region of the primer probe set. Additional assays may be used to measure the potency and efficacy of the modified oligonucleotides complementary to the amplicon region.

TABLE 1
Reduction of IFNAR1 RNA by 3-10-3 cEt gapmers with full PS internucleoside linkages in A431 cells

| | SEQ ID | SEQ | SEQ ID | SEQ | | | |
|---|---|---|---|---|---|---|---|
| | NO 1 | ID NO | NO 2 | ID NO | | | SEQ |
| Compound | Start | 1 Stop | Start | 2 Stop | | IFNAR1 | ID |
| Number | Site | Site | Site | Site | Sequence (5′ to 3′) | (% UTC) | NO |
| 1273126 | 22364 | 22379 | 620 | 635 | AAGCTTAAACCATCCA | 8 | 12 |
| 1273127 | 20044 | 20059 | 393 | 408 | GCATTTGGTACTAGTA | 8 | 13 |
| 1273128 | 35391 | 35406 | 2663 | 2678 | GGGTAAGCTACTTTCC | 67 | 14 |
| 1273129 | 20046 | 20061 | 395 | 410 | TTGCATTTGGTACTAG | 21 | 15 |
| 1273130 | 22386 | 22401 | 642 | 657 | CCAGATAACTAAGCTA | 78 | 16 |
| 1273131 | 22365 | 22380 | 621 | 636 | AAAGCTTAAACCATCC | 6 | 17 |
| 1273132 | 20037 | 20052 | 386 | 401 | GTACTAGTAATATTCT | 18 | 18 |
| 1273133 | 35396 | 35411 | 2668 | 2683 | TTCTAGGGTAAGCTAC | 47 | 19 |
| 1273134 | 35509 | 35524 | 2781 | 2796 | TCCTAAACCATGTAAG | 60 | 20 |
| 1273135 | 28448 | 28463 | 1195 | 1210 | GTTTTGGAGCACCGAT | 3 | 21 |
| 1273136 | 22611 | 22626 | 755 | 770 | GTAAGTAGTGCTGCTT | 3 | 22 |
| 1273137 | 35495 | 35510 | 2767 | 2782 | AGGGTAGATACTGTGA | 18 | 23 |
| 1273138 | 35844 | 35859 | 3116 | 3131 | CTGATTAGGTGCTCAG | 76 | 24 |
| 1273139 | 36997 | 37012 | 4269 | 4284 | CTTTTTAGGCTATCCA | 24 | 25 |
| 1273140 | 35520 | 35535 | 2792 | 2807 | CCTGGCTTTAATCCTA | 32 | 26 |
| 1273141 | 24315 | 24330 | 890 | 905 | GCATATGTATAATCCC | 3 | 27 |
| 1273142 | 35675 | 35690 | 2947 | 2962 | AAACTTGTACACACTC | 7 | 28 |
| 1273143 | 37341 | 37356 | 4613 | 4628 | GTTAATTGGTACCCCC | 17 | 29 |
| 1273144 | 28453 | 28468 | 1200 | 1215 | AGACTGTTTTGGAGCA | 4 | 30 |
| 1273145 | 37340 | 37355 | 4612 | 4627 | TTAATTGGTACCCCCA | 29 | 31 |
| 1273146 | 35502 | 35517 | 2774 | 2789 | CCATGTAAGGGTAGAT | 9 | 32 |
| 1273147 | 28443 | 28458 | 1190 | 1205 | GGAGCACCGATATAGA | 7 | 33 |
| 1273148 | 37343 | 37358 | 4615 | 4630 | CGGTTAATTGGTACCC | 71 | 34 |
| 1273149 | 37968 | 37983 | 5240 | 5255 | GTTAGTAGTCACATGG | 25 | 35 |
| 1273150 | 31765 | 31780 | 1298 | 1313 | GTTTTTTTCTCGATAA | 6 | 36 |
| 1273151 | 37392 | 37407 | 4664 | 4679 | TAGATTATATCTGGTC | 45 | 37 |
| 1273152 | 38058 | 38073 | 5330 | 5345 | TGAATAATAAGGTCCC | 33 | 38 |
| 1273153 | 37355 | 37370 | 4627 | 4642 | CTAATTTTCAGGCGGT | 15 | 39 |
| 1273154 | 38181 | 38196 | 5453 | 5468 | CGGTTATGTCCTTCTA | 40 | 40 |
| 1273155 | 4823 | 4838 | N/A | N/A | TGCATAACTGACTCCC | 50 | 41 |
| 1273156 | 5089 | 5104 | N/A | N/A | ACTGAGCAACATTACA | 11 | 42 |
| | 7595 | 7610 | | | | | |
| 1273157 | 5090 | 5105 | N/A | N/A | GACTGAGCAACATTAC | 7 | 43 |
| | 7596 | 7611 | | | | | |
| 1273158 | 7867 | 7882 | N/A | N/A | ACAATTAATTACCCCA | 7 | 14 |
| 1273159 | 8271 | 8286 | N/A | N/A | GGGTTTACAGAGTTTA | 14 | 45 |
| 1273160 | 5086 | 5101 | N/A | N/A | GAGCAACATTACAATC | 14 | 46 |
| | 7592 | 7607 | | | | | |
| 1273161 | 8795 | 8810 | N/A | N/A | GCAGAATTTATATCGC | 28 | 47 |
| 1273162 | 5147 | 5162 | N/A | N/A | GTCCTAGAATTGCATT | 24 | 48 |
| | 7649 | 7664 | | | | | |
| 1273163 | 37634 | 37649 | 4906 | 4921 | ACAATTCTAGGGAGCT | 52 | 49 |
| 1273164 | 11882 | 11897 | N/A | N/A | GTAACTTACATAGTAT | 56 | 50 |
| 1273165 | 11855 | 11870 | N/A | N/A | CCTTTAATGATGTCCC | 28 | 51 |
| 1273166 | 8791 | 8806 | N/A | N/A | AATTTATATCGCTTCA | 9 | 52 |
| 1273167 | 6512 | 6527 | N/A | N/A | CAGGATTTGACTTCCC | 33 | 53 |
| 1273168 | 12311 | 12326 | N/A | N/A | TTCTCATAAGGCTGGT | 39 | 54 |
| 1273169 | 12212 | 12227 | N/A | N/A | GCATAGCATTCTTGGC | 59 | 55 |
| 1273170 | 8793 | 8808 | N/A | N/A | AGAATTTATATCGCTT | 32 | 56 |
| 1273171 | 16543 | 16558 | N/A | N/A | GTTTTAGTTACAACTC | 15 | 57 |
| 1273172 | 14804 | 14819 | N/A | N/A | GTATTTGACTAAGTCT | 13 | 58 |
| 1273173 | 20255 | 20270 | N/A | N/A | GTTAGATTTTGCATCA | 34 | 59 |
| 1273174 | 12310 | 12325 | N/A | N/A | TCTCATAAGGCTGGTC | 40 | 60 |
| 1273175 | 6674 | 6689 | N/A | N/A | GTTGATTTCAGACCGG | 16 | 61 |
| 1273176 | 19656 | 19671 | N/A | N/A | TTTAGTATGTTGGCTC | 7 | 62 |
| 1273177 | 8794 | 8809 | N/A | N/A | CAGAATTTATATCGCT | 8 | 63 |
| 1273178 | 8957 | 8972 | N/A | N/A | GTTACATCAGATTCTG | 25 | 64 |
| 1273179 | 25821 | 25836 | N/A | N/A | ACAATCAAGGCCTTGT | 69 | 65 |
| 1273180 | 9026 | 9041 | N/A | N/A | TGCAATTTACCATCTA | 22 | 66 |
| 1273181 | 25542 | 25557 | N/A | N/A | TCTATTTGGTGACCCT | 4 | 67 |
| 1273182 | 22468 | 22483 | N/A | N/A | AGGATTAATTCGCCTA | 101 | 68 |
| 1273183 | 29536 | 29551 | N/A | N/A | GGGTTTAGACCAGTGT | 28 | 69 |
| 1273184 | 14454 | 14469 | N/A | N/A | AATGTTATTCTATCCC | 61 | 70 |
| 1273185 | 25543 | 25558 | N/A | N/A | ATCTATTTGGTGACCC | 9 | 71 |
| 1273186 | 11915 | 11930 | N/A | N/A | TTGTATATGCCTCTTA | 10 | 72 |
| 1273187 | 19829 | 19844 | N/A | N/A | CTTGAGCTAATGTCCT | 11 | 73 |
| 1273188 | 31243 | 31258 | N/A | N/A | CATATGATCTATTCCT | 29 | 74 |
| 1273189 | 22438 | 22453 | N/A | N/A | TCGATTAAACAGAGGT | 36 | 75 |
| 1273190 | 5087 | 5102 | N/A | N/A | TGAGCAACATTACAAT | 16 | 76 |
| | 7593 | 7608 | | | | | |
| 1273191 | 32424 | 32439 | N/A | N/A | TGAAGTAAGAGATCCT | 8 | 77 |
| 1273192 | 29928 | 29943 | N/A | N/A | GTTATGATTACCACCA | 5 | 78 |
| 1273193 | 39011 | 39026 | N/A | N/A | ACTATCGAATTCTCCT | 54 | 79 |
| 1273194 | 25768 | 25783 | N/A | N/A | CTTTAGCCCCTATTCA | 43 | 80 |
| 1273195 | 32813 | 32828 | N/A | N/A | GTTCATTACCTAGCTG | 55 | 81 |
| 1273196 | 19659 | 19674 | N/A | N/A | GGATTTAGTATGTTGG | 5 | 82 |
| 1273197 | 12309 | 12324 | N/A | N/A | CTCATAAGGCTGGTCT | 47 | 83 |
| 1273198 | 12189 | 12204 | N/A | N/A | GTATATCATCCCATCC | 40 | 84 |
| 1273199 | 33631 | 33646 | N/A | N/A | ATGTTTAGGCCTTCAC | 11 | 85 |
| 1273200 | 38830 | 38845 | N/A | N/A | GTTATTACTAAGTACC | 46 | 86 |
| 1273201 | 34129 | 34144 | N/A | N/A | GCATCATTAGTGAGGT | 11 | 87 |
| 1273202 | 29464 | 29479 | N/A | N/A | CCTAATCCTTCCCCCA | 37 | 88 |
| 1273203 | 39014 | 39029 | N/A | N/A | AGAACTATCGAATTCT | 93 | 89 |

### Example 2: Effect of 5-10-5 MOE Mixed Backbone Modified Oligonucleotides on Human IFNAR1 RNA In Vitro, Single Dose

[0636] Modified oligonucleotides complementary to human IFNAR1 nucleic acid were designed and tested for their single dose effects on IFNAR1 RNA in vitro. The modified oligonucleotides were tested in a series of experiments that had the same culture conditions.

[0637] The modified oligonucleotides in the tables below are 5-10-5 MOE gapmers with mixed PO/PS internucleoside linkages. The gapmers are 20 nucleosides in length, wherein the sugar motif for the gapmers is (from 5′ to 3′): eeeeeddddddddddeeeee; wherein each “d” represents a 2′-β-D-deoxyribosyl sugar moiety, and each “e” represents a 2′-MOE sugar moiety. The internucleoside linkage motif for the gapmers is (from 5′ to 3′): sooosssssssssssooss; wherein each “o” represents a phosphodiester internucleoside linkage, and each “s” represents a phosphorothioate internucleoside linkage. Each cytosine residue is a 5-methyl cytosine.

[0638] “Start site” indicates the 5′-most nucleoside to which the modified oligonucleotide is complementary in the target nucleic acid sequence. “Stop site” indicates the 3′-most nucleoside to which the modified oligonucleotide is complementary in the target nucleic acid sequence. Each modified oligonucleotide listed in the tables below is 100% complementary to SEQ ID NO 1 (described herein above), to SEQ ID NO 2 (described herein above), or to both. ‘N/A’ indicates that the modified oligonucleotide is not 100% complementary to that particular target nucleic acid sequence.

[0639] Cultured A431 cells were treated with modified oligonucleotide at a concentration of 4000 nM by free uptake at a density of 10,000 cells per well. After a treatment period of approximately 48 hours, total RNA was isolated from the cells and IFNAR1 RNA levels were measured by quantitative real-time RTPCR. IFNAR1 RNA levels were measured by human primer probe set RTS44352 (described herein above). IFNAR1 RNA levels were normalized to total RNA content, as measured by RIBOGREEN®. Reduction of IFNAR1 RNA is presented in the tables below as percent IFNAR1 RNA relative to the amount in untreated control cells (% UTC). Each table represents results from an individual assay plate. The values marked with a “†” indicate that the modified oligonucleotide is complementary to the amplicon region of the primer probe set. Additional assays may be used to measure the potency and efficacy of the modified oligonucleotides complementary to the amplicon region. N. D. in the tables below refers to instances where the value was Not Defined.

TABLE 2
Reduction of IFNAR1 RNA by 5-10-5 MOE gapmers with mixed PO/PS internucleoside linkages in
A431 cells

| | SEQ ID | SEQ | SEQ ID | SEQ | | | |
|---|---|---|---|---|---|---|---|
| | NO 1 | ID NO | NO 2 | ID NO | | IFNAR1 | |
| Compound | Start | 1 Stop | Start | 2 Stop | | (% | SEQ ID |
| Number | Site | Site | Site | Site | Sequence (5′ to 3′) | UTC) | NO |
| 1320916 | 25341 | 25360 | N/A | N/A | ACACTTCCCTTCTCCCTCAT | 67 | 90 |
| 1320967 | 25230 | 25249 | N/A | N/A | ATATCTTTCTTTCCATCTCT | 46 | 91 |
| 1320971 | 35382 | 35401 | 2654 | 2673 | AGCTACTTTCCAGAAAACCA | 38 | 92 |
| 1321005 | 24845 | 24864 | N/A | N/A | TAGTTCTTTCCAACTTTCTT | 55 | 93 |
| 1321015 | 21116 | 21135 | N/A | N/A | CACTCAGCTCCTTTACATTC | 89 | 94 |
| 1321042 | 26875 | 26894 | N/A | N/A | TTATTCAGCTTTCTTCCCAT | 64 | 95 |
| 1321079 | 35810 | 35829 | 3082 | 3101 | ATTCTTCTTCCTCTTGCACC | 46 | 96 |
| 1321133 | 25182 | 25201 | N/A | N/A | ACTTAATTTTCCTCTTCTCT | 61 | 97 |
| 1321157 | 11964 | 11983 | N/A | N/A | CTGTATCTCTCTCCAGACTT | 60 | 98 |
| 1321172 | 32353 | 32372 | N/A | N/A | GCACTTTTACACCATACAAC | 26 | 99 |
| 1321186 | 27342 | 27361 | N/A | N/A | ATGTTCCCAACTCCATATTC | 55 | 100 |
| 1321193 | 8324 | 8343 | N/A | N/A | TGGTTCTCATCCATTTGTTA | 45 | 101 |
| 1321235 | 13727 | 13746 | N/A | N/A | ACCTGGATCACCCTGCGCAT | 82 | 102 |
| 1321343 | 29325 | 29344 | N/A | N/A | TAAGAACCAATTTTTGTCCC | 94 | 103 |
| 1321392 | 14023 | 14042 | N/A | N/A | GGTGACATCATCACAAATAA | 68 | 104 |
| 1321441 | 17236 | 17255 | N/A | N/A | CAGCCTTTTTTAACTTTTTA | 101 | 105 |
| 1321451 | 22358 | 22377 | 614 | 633 | GCTTAAACCATCCAAAGCCC | 82 | 106 |
| 1321456 | 11522 | 11541 | N/A | N/A | TGATCTTCTTTTCATTGGGC | 77 | 107 |
| 1321511 | 28145 | 28164 | 990 | 1009 | TTTTGACATTTTCACAGTCA | 54† | 108 |
| 1321524 | 6264 | 6283 | N/A | N/A | AATTAATTTCTTAATGCACA | 85 | 109 |
| 1321555 | 29471 | 29490 | N/A | N/A | GGCAATTTTTTCCTAATCCT | 24 | 110 |
| 1321572 | 33884 | 33903 | N/A | N/A | GTCTATTTTAAATAATAGCT | 101 | 111 |
| 1321575 | 22541 | 22560 | 685 | 704 | CTGGAATAAATATTTTCAAT | 44 | 112 |
| 1321624 | 30254 | 30273 | N/A | N/A | TGGGCTCCAGCATCTACGGT | 69 | 113 |
| 1321650 | 29963 | 29982 | N/A | N/A | CTTTTAAACCTTATAAACAT | 96 | 114 |
| 1321669 | 5915 | 5934 | N/A | N/A | CAAAATTACCTCTCACTCTC | 79 | 115 |
| 1321671 | 19998 | 20017 | N/A | N/A | CCAATTATCCATCCCAGTTC | 40 | 116 |
| 1321725 | 30779 | 30798 | N/A | N/A | ATTTCCAAAACAACCACCAC | 88 | 117 |
| 1321773 | 9579 | 9598 | N/A | N/A | CTAGTTGGCCATCTTGCTAA | 81 | 118 |
| 1321782 | 35653 | 35672 | 2925 | 2944 | AGATCTTAAAATACAACAAT | 79 | 119 |
| 1321801 | 16450 | 16469 | N/A | N/A | TGCCTGCTTTTTCTTGGACA | 59 | 120 |
| 1321803 | 20506 | 20525 | N/A | N/A | TCAGTGACCATATCACCACA | 59 | 121 |
| 1321805 | 28962 | 28981 | N/A | N/A | GAAAAATGCTCATAATCTTC | 39 | 122 |
| 1321834 | 13490 | 13509 | N/A | N/A | TCTTAATTTCCTTATGCTTT | 74 | 123 |
| 1321847 | 37392 | 37411 | 4664 | 4683 | TTCTTAGATTATATCTGGTC | 43 | 124 |
| 1321877 | 31076 | 31095 | N/A | N/A | GCAAGCATTATTTAATTTCT | 6 | 125 |
| 1321968 | 29730 | 29749 | N/A | N/A | AGGGAAGCAGCCAAATCAAT | 46 | 126 |
| 1321970 | 28595 | 28614 | N/A | N/A | ATTCAAGCTTTATTTACCCA | 26 | 127 |
| 1321995 | 27811 | 27830 | N/A | N/A | CTGGTTTATTTTTTTTGGCT | 12 | 128 |
| 1322064 | 8791 | 8810 | N/A | N/A | GCAGAATTTATATCGCTTCA | 24 | 129 |
| 1322073 | 31292 | 31311 | N/A | N/A | AGATACACCACTATAACCAA | 33 | 130 |
| 1322129 | 24633 | 24652 | N/A | N/A | CTAGTTACACTTTCTTTTTT | 64 | 131 |
| 1322176 | 24313 | 24332 | 888 | 907 | TTGCATATGTATAATCCCAT | 6 | 132 |
| 1322203 | 9329 | 9348 | N/A | N/A | CAGAGGGAGATTTCTAGCCC | 59 | 133 |
| 1322215 | 36116 | 36135 | 3388 | 3407 | ATTCCCAGACTTCCTGCCTA | 46 | 134 |
| 1322250 | 24287 | 24306 | 862 | 881 | ACATAGTTCTGATTTTGGAC | 11 | 135 |
| 1322302 | 38831 | 38850 | N/A | N/A | ATTTTGTTATTACTAAGTAC | 36 | 136 |
| 1322318 | 22856 | 22875 | N/A | N/A | CCTGAACTTTTAAGTAGAAT | 87 | 137 |
| 1322320 | 16055 | 16074 | N/A | N/A | ACAATATATTTACAAAGTGT | 65 | 138 |
| 1322334 | 25748 | 25767 | N/A | N/A | CCTTTACATTTTCAATTTCT | 43 | 139 |
| 1322340 | 38114 | 38133 | 5386 | 5405 | TTAGATTTCATTCATTCAAT | 59 | 140 |
| 1322347 | 34407 | 34426 | 1679 | 1698 | AGTTTCTTCTACTGTAGCAA | 28 | 141 |
| 1322350 | 25527 | 25546 | N/A | N/A | ACCCTATTATTTATTCACTT | 57 | 142 |
| 1322385 | 18473 | 18492 | N/A | N/A | GACGATTTAGATATTAGAAA | 71 | 143 |
| 1322391 | 25841 | 25860 | N/A | N/A | TCTACTTAAAAAAAATCTGA | 95 | 144 |
| 1322441 | 7747 | 7766 | N/A | N/A | GTTTACTATATCTTTAAGTC | 58 | 145 |
| 1322494 | 7237 | 7256 | N/A | N/A | TCTGCAGGCCTCATCTGCAT | 112 | 146 |
| 1322560 | 27068 | 27087 | N/A | N/A | CCCAGAACTCTAATAGCCTC | 48 | 147 |
| 1322650 | 30079 | 30098 | N/A | N/A | TCTATAGTAACAATTATTGA | 93 | 148 |
| 1322694 | 25137 | 25156 | N/A | N/A | TCCAATCAATATAAACTACA | 60 | 149 |
| 1322704 | 26977 | 26996 | N/A | N/A | CCTTCCTCAAATCCAGAGCT | 61 | 150 |
| 1322777 | 31741 | 31760 | N/A | N/A | TCTCTAGAAAATATAATTAA | 96 | 151 |
| 1322802 | 8524 | 8543 | N/A | N/A | TTGCTCTTTCCAGTTAGATC | 26 | 152 |
| 1322807 | 37070 | 37089 | 4342 | 4361 | ACCTAACAATTTCACTGGTG | 81 | 153 |
| 1322827 | 20171 | 20190 | N/A | N/A | AGCAACTTTTTCTTACCTTT | 88 | 154 |
| 1322829 | 25660 | 25679 | N/A | N/A | TGCTTTCAATTTTTGAACCA | 57 | 155 |
| 1322842 | 34656 | 34675 | 1928 | 1947 | AGATGTTTTTTCTTTCCCTA | 57 | 156 |
| 1322862 | 18165 | 18184 | N/A | N/A | ATAATTTCAACCCAACCTCA | 81 | 157 |
| 1322896 | 4814 | 4833 | N/A | N/A | AACTGACTCCCTTTACTCTC | 81 | 158 |
| 1322918 | 5166 | 5185 | N/A | N/A | TTGGACAGTTTTCTTAGTCT | 66 | 159 |
| 1322940 | 38363 | 38382 | 5635 | 5654 | GATGAATACCTTTTAAAGGC | 91 | 160 |
| 1323019 | 19587 | 19606 | N/A | N/A | TCTTATCTTCCTTATTGAAA | 64 | 161 |
| 1323025 | 26621 | 26640 | N/A | N/A | ATCAGTTGAATCAAATGAGA | 59 | 162 |
| 1323236 | 32968 | 32987 | N/A | N/A | AGGACAATCATTACTATCTC | 41 | 163 |
| 1323270 | 12472 | 12491 | N/A | N/A | TCCTCTCTTATTATTTATCA | 96 | 164 |
| 1323282 | 10705 | 10724 | N/A | N/A | AAGTCATGACTCTAAATCTT | 77 | 165 |
| 1323293 | 28506 | 28525 | 1253 | 1272 | TTCCCAAAAAATAATTTCAT | 119 | 166 |
| 1323337 | 33600 | 33619 | N/A | N/A | TTCATTTAATATGCTAGCTT | 70 | 167 |

TABLE 3
Reduction of IFNAR1 RNA by 5-10-5 MOE gapmers with mixed PO/PS internucleoside linkages
in A431 cells

| | SEQ ID | SEQ ID | SEQ ID | SEQ ID | | | |
|---|---|---|---|---|---|---|---|
| | NO 1 | NO 1 | NO 2 | NO 2 | | IFNAR1 | |
| Compound | Start | Stop | Start | Stop | | (% | SEQ ID |
| Number | Site | Site | Site | Site | Sequence (5' to 3') | UTC) | NO |
| 1320927 | 38113 | 38132 | 5385 | 5404 | TAGATTTCATTCATTCAATA | 64 | 168 |
| 1320929 | 9319 | 9338 | N/A | N/A | TTTCTAGCCCTTTAAATCCA | 77 | 169 |
| 1321082 | 27341 | 27360 | N/A | N/A | TGTTCCCAACTCCATATTCA | 65 | 170 |
| 1321121 | 7234 | 7253 | N/A | N/A | GCAGGCCTCATCTGCATCAA | 86 | 171 |
| 1321143 | 22533 | 22552 | N/A | N/A | AATATTTTCAATCCTTTCCT | 70 | 172 |
| 1321161 | 8444 | 8463 | N/A | N/A | AATGTGGTACCCATCAGGTC | 51 | 173 |
| 1321182 | 34386 | 34405 | 1658 | 1677 | TGTGCTTATATTTTCAATTA | 26 | 174 |
| 1321188 | 26976 | 26995 | N/A | N/A | CTTCCTCAAATCCAGAGCTC | 83 | 175 |
| 1321258 | 13461 | 13480 | N/A | N/A | ATTTTGCCATATACAGGGTT | 73 | 176 |
| 1321274 | 16408 | 16427 | N/A | N/A | GGCCCCAACACATAATCGGA | 93 | 177 |
| 1321281 | 38362 | 38381 | 5634 | 5653 | ATGAATACCTTTTAAAGGCA | 94 | 178 |
| 1321359 | 25338 | 25357 | N/A | N/A | CTTCCCTTCTCCCTCATTTT | 83 | 179 |
| 1321404 | 16046 | 16065 | N/A | N/A | TTACAAAGTGTATCTAGGCC | 55 | 180 |
| 1321476 | 21115 | 21134 | N/A | N/A | ACTCAGCTCCTTTACATTCT | 67 | 181 |
| 1321530 | 20169 | 20188 | N/A | N/A | CAACTTTTTCTTACCTTTGC | 96 | 182 |
| 1321564 | 29470 | 29489 | N/A | N/A | GCAATTTTTTCCTAATCCTT | 63 | 183 |
| 1321594 | 26617 | 26636 | N/A | N/A | GTTGAATCAAATGAGAGACT | 43 | 184 |
| 1321610 | 25228 | 25247 | N/A | N/A | ATCTTTCTTTCCATCTCTTT | 55 | 185 |
| 1321639 | 29727 | 29746 | N/A | N/A | GAAGCAGCCAAATCAATGGA | 58 | 186 |
| 1321651 | 19997 | 20016 | N/A | N/A | CAATTATCCATCCCAGTTCT | 60 | 187 |
| 1321663 | 11960 | 11979 | N/A | N/A | ATCTCTCTCCAGACTTGGGA | 70 | 188 |
| 1321681 | 25181 | 25200 | N/A | N/A | CTTAATTTTCCTCTTCTCTT | 65 | 189 |
| 1321689 | 20505 | 20524 | N/A | N/A | CAGTGACCATATCACCACAT | 68 | 190 |
| 1321707 | 31291 | 31310 | N/A | N/A | GATACACCACTATAACCAAA | 22 | 191 |
| 1321728 | 28594 | 28613 | N/A | N/A | TTCAAGCTTTATTTACCCAA | 26 | 192 |
| 1321754 | 8782 | 8801 | N/A | N/A | ATATCGCTTCATACTTGATT | 48 | 193 |
| 1321830 | 17195 | 17214 | N/A | N/A | GGGAGACAATATCTCATGGC | 40 | 194 |
| 1321856 | 29243 | 29262 | N/A | N/A | GGAAGGAACACTACTGGCAT | 24 | 195 |
| 1321870 | 28141 | 28160 | 986 | 1005 | GACATTTTCACAGTCAGGTA | 0† | 196 |
| 1321941 | 36113 | 36132 | 3385 | 3404 | CCCAGACTTCCTGCCTATTA | 47 | 197 |
| 1322004 | 9578 | 9597 | N/A | N/A | TAGTTGGCCATCTTGCTAAC | 95 | 198 |
| 1322018 | 37391 | 37410 | 4663 | 4682 | TCTTAGATTATATCTGGTCT | 30 | 199 |
| 1322028 | 34655 | 34674 | 1927 | 1946 | GATGTTTTTTCTTTCCCTAA | 29 | 200 |
| 1322045 | 25633 | 25652 | N/A | N/A | TTCTGCTGACTCTTTCCATT | 26 | 201 |
| 1322103 | 30252 | 30271 | N/A | N/A | GGCTCCAGCATCTACGGTCT | 83 | 202 |
| 1322108 | 37036 | 37055 | 4308 | 4327 | TGTCCGTATTTTCCCTTCTC | 23 | 203 |
| 1322123 | 30076 | 30095 | N/A | N/A | ATAGTAACAATTATTGATAT | 94 | 204 |
| 1322146 | 27067 | 27086 | N/A | N/A | CCAGAACTCTAATAGCCTCC | 40 | 205 |
| 1322176 | 24313 | 24332 | 888 | 907 | TTGCATATGTATAATCCCAT | 9 | 132 |
| 1322177 | 24630 | 24649 | N/A | N/A | GTTACACTTTCTTTTTTTTC | 27 | 206 |
| 1322181 | 28494 | 28513 | 1241 | 1260 | AATTTCATAAATCAGTGGAT | 30 | 207 |
| 1322214 | 4812 | 4831 | N/A | N/A | CTGACTCCCTTTACTCTCTT | 79 | 208 |
| 1322241 | 35381 | 35400 | 2653 | 2672 | GCTACTTTCCAGAAAACCAA | 53 | 209 |
| 1322246 | 31075 | 31094 | N/A | N/A | CAAGCATTATTTAATTTCTC | 16 | 210 |
| 1322284 | 32259 | 32278 | N/A | N/A | ACTAAACCAATTCCCACATT | 92 | 211 |
| 1322326 | 32967 | 32986 | N/A | N/A | GGACAATCATTACTATCTCA | 20 | 212 |
| 1322348 | 13725 | 13744 | N/A | N/A | CTGGATCACCCTGCGCATCA | 74 | 213 |
| 1322413 | 22843 | 22862 | N/A | N/A | GTAGAATTAATTTTCATTAC | 60 | 214 |
| 1322425 | 29961 | 29980 | N/A | N/A | TTTAAACCTTATAAACATCC | 47 | 215 |
| 1322626 | 33883 | 33902 | N/A | N/A | TCTATTTTAAATAATAGCTA | 107 | 216 |
| 1322646 | 25136 | 25155 | N/A | N/A | CCAATCAATATAAACTACAT | 84 | 217 |
| 1322657 | 25526 | 25545 | N/A | N/A | CCCTATTATTTATTCACTTC | 74 | 218 |
| 1322703 | 31740 | 31759 | N/A | N/A | CTCTAGAAAATATAATTAAA | 100 | 219 |
| 1322740 | 38829 | 38848 | N/A | N/A | TTTGTTATTACTAAGTACCA | 69 | 220 |
| 1322750 | 6237 | 6256 | N/A | N/A | GGAATGTCAATTTTATATGA | 61 | 221 |
| 1322751 | 12471 | 12490 | N/A | N/A | CCTCTCTTATTATTTATCAT | 86 | 222 |
| 1322812 | 5142 | 5161 | N/A | N/A | TCCTAGAATTGCATTTACTA | 53 | 223 |
| | 7644 | 7663 | | | | | |
| 1322840 | 35809 | 35828 | 3081 | 3100 | TTCTTCTTCCTCTTGCACCA | 37 | 224 |
| 1322885 | 5910 | 5929 | N/A | N/A | TTACCTCTCACTCTCTATCA | 95 | 225 |
| 1322915 | 18425 | 18444 | N/A | N/A | GCTGAACCAAATACAAGTCT | 41 | 226 |
| 1322920 | 8310 | 8329 | N/A | N/A | TTGTTAGAATTTATAGATTC | 90 | 227 |
| 1322973 | 28961 | 28980 | N/A | N/A | AAAAATGCTCATAATCTTCA | 50 | 228 |
| 1323021 | 25747 | 25766 | N/A | N/A | CTTTACATTTTCAATTTCTG | 60 | 229 |
| 1323035 | 26871 | 26890 | N/A | N/A | TCAGCTTTCTTCCCATTGCC | 36 | 230 |
| 1323049 | 24269 | 24288 | 844 | 863 | ACACTGACTTCTATATTTTC | 37 | 231 |
| 1323068 | 27551 | 27570 | N/A | N/A | CTCGGCCTCCTAAAATACAA | 87 | 232 |
| 1323083 | 14021 | 14040 | N/A | N/A | TGACATCATCACAAATAATT | 86 | 233 |
| 1323108 | 22348 | 22367 | 604 | 623 | TCCAAAGCCCACATAACACT | 59 | 234 |
| 1323125 | 30777 | 30796 | N/A | N/A | TTCCAAAACAACCACCACCA | 87 | 235 |
| 1323134 | 7681 | 7700 | N/A | N/A | GTCTTCCCATATTTTGGATA | 49 | 236 |
| 1323142 | 19555 | 19574 | N/A | N/A | GTCAACATAGCAAACCCTGT | 67 | 237 |
| 1323148 | 35652 | 35671 | 2924 | 2943 | GATCTTAAAATACAACAATT | 100 | 238 |
| 1323195 | 33588 | 33607 | N/A | N/A | GCTAGCTTCATAGAAGTGCC | 95 | 239 |
| 1323222 | 18161 | 18180 | N/A | N/A | TTTCAACCCAACCTCACTGT | 72 | 240 |
| 1323233 | 10704 | 10723 | N/A | N/A | AGTCATGACTCTAAATCTTG | 85 | 241 |
| 1323257 | 25826 | 25845 | N/A | N/A | TCTGAATTAACAATCAAGGC | 23 | 242 |
| 1323277 | 11521 | 11540 | N/A | N/A | GATCTTCTTTTCATTGGGCC | 101 | 243 |
| 1323283 | 24844 | 24863 | N/A | N/A | AGTTCTTTCCAACTTTCTTT | 31 | 244 |

TABLE 4
Reduction of IFNAR1 RNA by 5-10-5 MOE gapmers with mixed PO/PS internucleoside linkages
in A431 cells

| | SEQ ID | SEQ ID | SEQ ID | SEQ ID | | | |
|---|---|---|---|---|---|---|---|
| | NO 1 | NO 1 | NO 2 | NO 2 | | IFNAR1 | |
| Compound | Start | Stop | Start | Stop | | (% | SEQ ID |
| Number | Site | Site | Site | Site | Sequence (5' to 3') | UTC) | NO |
| 1320902 | 33587 | 33606 | N/A | N/A | CTAGCTTCATAGAAGTGCCA | 63 | 245 |
| 1320913 | 31289 | 31308 | N/A | N/A | TACACCACTATAACCAAATC | 89 | 246 |
| 1320934 | 11520 | 11539 | N/A | N/A | ATCTTCTTTTCATTGGGCCA | 90 | 247 |
| 1320943 | 4808 | 4827 | N/A | N/A | CTCCCTTTACTCTCTTTTTC | 87 | 248 |
| 1320964 | 8443 | 8462 | N/A | N/A | ATGTGGTACCCATCAGGTCT | 82 | 249 |
| 1321023 | 38095 | 38114 | 5367 | 5386 | TAATTATTTTCTAAGTACTT | 101 | 250 |
| 1321029 | 26586 | 26605 | N/A | N/A | GCCTGACCTAATCAGATGAA | 86 | 251 |
| 1321030 | 8301 | 8320 | N/A | N/A | TTTATAGATTCTATGCAGCC | 57 | 252 |
| 1321058 | 17137 | 17156 | N/A | N/A | TGACCATTTTTTCACATACT | 31 | 253 |
| 1321067 | 24841 | 24860 | N/A | N/A | TCTTTCCAACTTTCTTTCCC | 61 | 254 |
| 1321077 | 34652 | 34671 | 1924 | 1943 | GTTTTTTCTTTCCCTAAACA | 83 | 255 |
| 1321093 | 25227 | 25246 | N/A | N/A | TCTTTCTTTCCATCTCTTTT | 55 | 256 |
| 1321112 | 28124 | 28143 | 969 | 988 | GTATTTGTTTCCATTTATAC | 60† | 257 |
| 1321120 | 29960 | 29979 | N/A | N/A | TTAAACCTTATAAACATCCT | 76 | 258 |
| 1321129 | 19407 | 19426 | N/A | N/A | TAGGCTATGATCATATCACT | 94 | 259 |
| 1321164 | 5137 | 5156 | N/A | N/A | GAATTGCATTTACTAGTTTA | 73 | 260 |
| 1321166 | 8765 | 8784 | N/A | N/A | ATTTGCATTTTTTCAGAGTA | 48 | 261 |
| 1321201 | 25337 | 25356 | N/A | N/A | TTCCCTTCTCCCTCATTTTT | 89 | 262 |
| 1321229 | 22532 | 22551 | N/A | N/A | ATATTTTCAATCCTTTCCTA | 91 | 263 |
| 1321233 | 32246 | 32265 | N/A | N/A | CCACATTAAAAAACTCACAA | 79 | 264 |
| 1321242 | 33869 | 33888 | N/A | N/A | TAGCTATGAATATTACAGTA | 58 | 265 |
| 1321277 | 28592 | 28611 | N/A | N/A | CAAGCTTTATTTACCCAAAT | 30 | 266 |
| 1321287 | 9571 | 9590 | N/A | N/A | CCATCTTGCTAACATCACTC | 73 | 267 |
| 1321305 | 26959 | 26978 | N/A | N/A | CTCAGGTTAACTATCACCCC | 63 | 268 |
| 1321356 | 30604 | 30623 | N/A | N/A | TGAGCTGACATCACATGAGT | 83 | 269 |
| 1321389 | 16365 | 16384 | N/A | N/A | TCTGTGTTCCCTTCTATATT | 63 | 270 |
| 1321486 | 35802 | 35821 | 3074 | 3093 | TCCTCTTGCACCAAAGCCAG | 68 | 271 |
| 1321507 | 22832 | 22851 | N/A | N/A | TTTCATTACTATTTGAGACA | 59 | 272 |
| 1321520 | 10702 | 10721 | N/A | N/A | TCATGACTCTAAATCTTGGA | 75 | 273 |
| 1321558 | 26870 | 26889 | N/A | N/A | CAGCTTTCTTCCCATTGCCA | 62 | 274 |
| 1321571 | 25746 | 25765 | N/A | N/A | TTTACATTTTCAATTTCTGC | 55 | 275 |
| 1321589 | 24268 | 24287 | 843 | 862 | CACTGACTTCTATATTTTCT | 43 | 276 |
| 1321638 | 30212 | 30231 | N/A | N/A | ACCGTCCCAAGTATTTGCCA | 53 | 277 |
| 1321666 | 37035 | 37054 | 4307 | 4326 | GTCCGTATTTTCCCTTCTCC | 32 | 278 |
| 1321796 | 7230 | 7249 | N/A | N/A | GCCTCATCTGCATCAAGGGT | 93 | 279 |
| 1321928 | 25133 | 25152 | N/A | N/A | ATCAATATAAACTACATGCA | 97 | 280 |
| 1321945 | 12433 | 12452 | N/A | N/A | TAAGGTTTAATTCTTTTCTC | 98 | 281 |
| 1321957 | 25180 | 25199 | N/A | N/A | TTAATTTTCCTCTTCTCTTT | 85 | 282 |
| 1322001 | 14020 | 14039 | N/A | N/A | GACATCATCACAAATAATTG | 73 | 283 |
| 1322013 | 34383 | 34402 | 1655 | 1674 | GCTTATATTTTCAATTATGA | 34 | 284 |
| 1322022 | 38792 | 38811 | 6064 | 6083 | TAGGGATGATTTATTTATTA | 78 | 285 |
| 1322030 | 7668 | 7687 | N/A | N/A | TTGGATAGTTTTCTTAATCT | 62 | 286 |
| 1322057 | 25630 | 25649 | N/A | N/A | TGCTGACTCTTTCCATTTCT | 39 | 287 |
| 1322069 | 22347 | 22366 | 603 | 622 | CCAAAGCCCACATAACACTA | 49 | 288 |
| 1322111 | 31074 | 31093 | N/A | N/A | AAGCATTATTTAATTTCTCT | 52 | 289 |
| 1322176 | 24313 | 24332 | 888 | 907 | TTGCATATGTATAATCCCAT | 9 | 132 |
| 1322185 | 29469 | 29488 | N/A | N/A | CAATTTTTTCCTAATCCTTC | 100 | 290 |
| 1322259 | 30075 | 30094 | N/A | N/A | TAGTAACAATTATTGATATA | 91 | 291 |
| 1322265 | 15979 | 15998 | N/A | N/A | TGAGCAGACCACCTGAGGTA | 95 | 292 |
| 1322274 | 18160 | 18179 | N/A | N/A | TTCAACCCAACCTCACTGTT | 90 | 293 |
| 1322333 | 5907 | 5926 | N/A | N/A | CCTCTCACTCTCTATCAACC | 89 | 294 |
| 1322335 | 31738 | 31757 | N/A | N/A | CTAGAAAATATAATTAAATC | 107 | 295 |
| 1322409 | 37390 | 37409 | 4662 | 4681 | CTTAGATTATATCTGGTCTC | 70 | 296 |
| 1322411 | 27336 | 27355 | N/A | N/A | CCAACTCCATATTCAGGGAC | 51 | 297 |
| 1322416 | 35351 | 35370 | 2623 | 2642 | GTTCAGACTTTCCTAAATAA | 31 | 298 |
| 1322583 | 38361 | 38380 | 5633 | 5652 | TGAATACCTTTTAAAGGCAT | 107 | 299 |
| 1322628 | 20167 | 20186 | N/A | N/A | ACTTTTTCTTACCTTTGCGA | 96 | 300 |
| 1322690 | 18420 | 18439 | N/A | N/A | ACCAAATACAAGTCTACCTT | 69 | 301 |
| 1322692 | 13430 | 13449 | N/A | N/A | GGTTTTGTTTTTTTTAGCAC | 43 | 302 |
| 1322716 | 20503 | 20522 | N/A | N/A | GTGACCATATCACCACATCA | 64 | 303 |
| 1322717 | 11911 | 11930 | N/A | N/A | TTGTATATGCCTCTTACCTT | 60 | 304 |
| 1322734 | 36112 | 36131 | 3384 | 3403 | CCAGACTTCCTGCCTATTAA | 46 | 305 |
| 1322748 | 25825 | 25844 | N/A | N/A | CTGAATTAACAATCAAGGCC | 57 | 306 |
| 1322780 | 25522 | 25541 | N/A | N/A | ATTATTTATTCACTTCTGAA | 95 | 307 |
| 1322819 | 28960 | 28979 | N/A | N/A | AAAATGCTCATAATCTTCAT | 67 | 308 |
| 1322867 | 28493 | 28512 | 1240 | 1259 | ATTTCATAAATCAGTGGATA | 70 | 309 |
| 1322955 | 29726 | 29745 | N/A | N/A | AAGCAGCCAAATCAATGGAA | 48 | 310 |
| 1322970 | 13718 | 13737 | N/A | N/A | ACCCTGCGCATCACTTGACA | 99 | 311 |
| 1323070 | 9257 | 9276 | N/A | N/A | AAGGTGTAACAACAACAACC | 100 | 312 |
| 1323092 | 27048 | 27067 | N/A | N/A | CTGACTGGTTTCCTTATCTC | 64 | 313 |
| 1323137 | 29177 | 29196 | N/A | N/A | GGACAGCCCCCTCCCAAGGA | 93 | 314 |
| 1323153 | 27549 | 27568 | N/A | N/A | CGGCCTCCTAAAATACAAAC | 91† | 315 |
| 1323226 | 19922 | 19941 | N/A | N/A | ATACTTTCTATTTACTGGTA | 55 | 316 |
| 1323246 | 24623 | 24642 | N/A | N/A | TTTCTTTTTTTTCTTAAGCC | 41 | 317 |
| 1323247 | 6207 | 6226 | N/A | N/A | AAAGCTTTTTTCACATCAAA | 64 | 318 |
| 1323333 | 21113 | 21132 | N/A | N/A | TCAGCTCCTTTACATTCTTA | 57 | 319 |
| 1323344 | 35644 | 35663 | 2916 | 2935 | AATACAACAATTATTTCTCT | 60 | 320 |
| 1323346 | 32962 | 32981 | N/A | N/A | ATCATTACTATCTCATGCTA | 71 | 321 |

TABLE 5
Reduction of IFNAR1 RNA by 5-10-5 MOE gapmers with mixed PO/PS internucleoside linkages
in A431 cells

| | SEQ ID | SEQ ID | SEQ ID | SEQ ID | | | |
|---|---|---|---|---|---|---|---|
| | NO 1 | NO 1 | NO 2 | NO 2 | | IFNAR1 | |
| Compound | Start | Stop | Start | Stop | | (% | SEQ ID |
| Number | Site | Site | Site | Site | Sequence (5' to 3') | UTC) | NO |
| 1320888 | 27047 | 27066 | N/A | N/A | TGACTGGTTTCCTTATCTCT | 63 | 322 |
| 1320901 | 6206 | 6225 | N/A | N/A | AAGCTTTTTTCACATCAAAC | 63 | 323 |
| 1320919 | 34649 | 34668 | 1921 | 1940 | TTTTCTTTCCCTAAACAGGG | 96 | 324 |
| 1320981 | 32096 | 32115 | N/A | N/A | GCATCCAACAACACCGACTT | 57 | 325 |
| 1320994 | 28591 | 28610 | N/A | N/A | AAGCTTTATTTACCCAAATC | 51 | 326 |
| 1321002 | 19311 | 19330 | N/A | N/A | TGATGATTCCCTTCTGACCT | 49 | 327 |
| 1321035 | 9570 | 9589 | N/A | N/A | CATCTTGCTAACATCACTCT | 97 | 328 |
| 1321044 | 22819 | 22838 | N/A | N/A | TGAGACAAAAATCCCAAGTA | 59 | 329 |
| 1321056 | 17136 | 17155 | N/A | N/A | GACCATTTTTTCACATACTT | 12 | 330 |
| 1321081 | 28120 | 28139 | 965 | 984 | TTGTTTCCATTTATACAAAT | 72† | 331 |
| 1321106 | 11496 | 11515 | N/A | N/A | TAGAGAGTTCTTACTTTCCT | 99 | 332 |
| 1321159 | 35799 | 35818 | 3071 | 3090 | TCTTGCACCAAAGCCAGCGA | 58 | 333 |
| 1321184 | 26576 | 26595 | N/A | N/A | ATCAGATGAACCCCTTAAAA | 62 | 334 |
| 1321187 | 31072 | 31091 | N/A | N/A | GCATTATTTAATTTCTCTCT | 13 | 335 |
| 1321203 | 21112 | 21131 | N/A | N/A | CAGCTCCTTTACATTCTTAA | 65 | 336 |
| 1321216 | 30602 | 30621 | N/A | N/A | AGCTGACATCACATGAGTGC | 95 | 337 |
| 1321250 | 25336 | 25355 | N/A | N/A | TCCCTTCTCCCTCATTTTTT | 91 | 338 |
| 1321271 | 29176 | 29195 | N/A | N/A | GACAGCCCCCTCCCAAGGAA | 77 | 339 |
| 1321304 | 33867 | 33886 | N/A | N/A | GCTATGAATATTACAGTACA | 44 | 340 |
| 1321332 | 25629 | 25648 | N/A | N/A | GCTGACTCTTTCCATTTCTT | 21 | 341 |
| 1321352 | 11910 | 11929 | N/A | N/A | TGTATATGCCTCTTACCTTT | 61 | 342 |
| 1321393 | 20501 | 20520 | N/A | N/A | GACCATATCACCACATCACA | 51 | 343 |
| 1321403 | 7667 | 7686 | N/A | N/A | TGGATAGTTTTCTTAATCTA | 72 | 344 |
| 1321468 | 29725 | 29744 | N/A | N/A | AGCAGCCAAATCAATGGAAT | 66 | 345 |
| 1321484 | 37034 | 37053 | 4306 | 4325 | TCCGTATTTTCCCTTCTCCA | 25 | 346 |
| 1321513 | 38791 | 38810 | 6063 | 6082 | AGGGATGATTTATTTATTAT | 62 | 347 |
| 1321531 | 31288 | 31307 | N/A | N/A | ACACCACTATAACCAAATCA | 61 | 348 |
| 1321537 | 30064 | 30083 | N/A | N/A | ATTGATATATTATCCAGTAT | 39 | 349 |
| 1321604 | 18405 | 18424 | N/A | N/A | ACCTTGTTTTTCAAAATGGA | 85 | 350 |
| 1321642 | 36109 | 36128 | 3381 | 3400 | GACTTCCTGCCTATTAAGGA | 63 | 351 |
| 1321668 | 33571 | 33590 | N/A | N/A | GCCAAACAAAAAACTGTGAT | 47 | 352 |
| 1321712 | 8433 | 8452 | N/A | N/A | CATCAGGTCTCCCCATCCTC | 91 | 353 |
| 1321775 | 35643 | 35662 | 2915 | 2934 | ATACAACAATTATTTCTCTA | 73 | 354 |
| 1321778 | 10700 | 10719 | N/A | N/A | ATGACTCTAAATCTTGGAAT | 72 | 355 |
| 1321783 | 38060 | 38079 | 5332 | 5351 | CAGTAATGAATAATAAGGTC | 67 | 356 |
| 1321843 | 13663 | 13682 | N/A | N/A | GGCAATAGCCCCACTGGCTG | 90 | 357 |
| 1321887 | 25177 | 25196 | N/A | N/A | ATTTTCCTCTTCTCTTTTCT | 105 | 358 |
| 1322000 | 27548 | 27567 | N/A | N/A | GGCCTCCTAAAATACAAACT | 93† | 359 |
| 1322109 | 25226 | 25245 | N/A | N/A | CTTTCTTTCCATCTCTTTTC | 64 | 360 |
| 1322144 | 29468 | 29487 | N/A | N/A | AATTTTTTCCTAATCCTTCC | 87 | 361 |
| 1322151 | 12432 | 12451 | N/A | N/A | AAGGTTTAATTCTTTTCTCT | 79 | 362 |
| 1322176 | 24313 | 24332 | 888 | 907 | TTGCATATGTATAATCCCAT | 6 | 132 |
| 1322212 | 25500 | 25519 | N/A | N/A | TGAGGTATACACAAAAGACT | 86 | 363 |
| 1322220 | 4801 | 4820 | N/A | N/A | TACTCTCTTTTTCTCTTCAA | 86 | 364 |
| 1322254 | 22342 | 22361 | 598 | 617 | GCCCACATAACACTATCTTT | 51 | 365 |
| 1322256 | 24840 | 24859 | N/A | N/A | CTTTCCAACTTTCTTTCCCA | 45 | 366 |
| 1322374 | 38328 | 38347 | 5600 | 5619 | TCTGTTGCATACAAATTCAC | 88 | 367 |
| 1322387 | 5904 | 5923 | N/A | N/A | CTCACTCTCTATCAACCTTG | 39 | 368 |
| 1322395 | 25744 | 25763 | N/A | N/A | TACATTTTCAATTTCTGCAA | 56 | 369 |
| 1322461 | 22527 | 22546 | N/A | N/A | TTCAATCCTTTCCTATAACA | 74 | 370 |
| 1322502 | 27290 | 27309 | N/A | N/A | ATGGTGGGAATATTTATATC | 21 | 371 |
| 1322537 | 15626 | 15645 | N/A | N/A | GTACAATGCCATATCTTCAA | 18 | 372 |
| 1322566 | 18159 | 18178 | N/A | N/A | TCAACCCAACCTCACTGTTT | 80 | 373 |
| 1322572 | 32961 | 32980 | N/A | N/A | TCATTACTATCTCATGCTAT | 63 | 374 |
| 1322593 | 28957 | 28976 | N/A | N/A | ATGCTCATAATCTTCATTTT | 51 | 375 |
| 1322616 | 35350 | 35369 | 2622 | 2641 | TTCAGACTTTCCTAAATAAA | 57 | 376 |
| 1322639 | 19900 | 19919 | N/A | N/A | AGAGTTATTTCTTAACTCTT | 103 | 377 |
| 1322678 | 5114 | 5133 | N/A | N/A | AGTATGACTATTTTTATGAC | 57 | 378 |
| 1322683 | 31737 | 31756 | N/A | N/A | TAGAAAATATAATTAAATCA | 102 | 379 |
| 1322720 | 13414 | 13433 | N/A | N/A | GCACTTTGAATACACTGGTC | 44 | 380 |
| 1322746 | 20166 | 20185 | N/A | N/A | CTTTTTCTTACCTTTGCGAA | 96 | 381 |
| 1322749 | 16363 | 16382 | N/A | N/A | TGTGTTCCCTTCTATATTCC | 50 | 382 |
| 1322760 | 25119 | 25138 | N/A | N/A | CATGCAGTTCTCTTTTATCA | 31 | 383 |
| 1322763 | 37375 | 37394 | 4647 | 4666 | GTCTCTCTAAGAACTATCAA | 97 | 384 |
| 1322772 | 30205 | 30224 | N/A | N/A | CAAGTATTTGCCAAACAGCA | 56 | 385 |
| 1322839 | 26869 | 26888 | N/A | N/A | AGCTTTCTTCCCATTGCCAC | 72 | 386 |
| 1322865 | 6945 | 6964 | N/A | N/A | CCTTAGGACATCCCAGACAT | 85 | 387 |
| 1322948 | 34369 | 34388 | 1641 | 1660 | TTATGAAACATTTTTCGATT | 87 | 388 |
| 1322949 | 29959 | 29978 | N/A | N/A | TAAACCTTATAAACATCCTT | 56 | 389 |
| 1323003 | 9255 | 9274 | N/A | N/A | GGTGTAACAACAACAACCGC | 87 | 390 |
| 1323053 | 8762 | 8781 | N/A | N/A | TGCATTTTTTCAGAGTATCC | 21 | 391 |
| 1323103 | 24605 | 24624 | N/A | N/A | CCAGTAAGAACCCCAGATAT | 60 | 392 |
| 1323149 | 8300 | 8319 | N/A | N/A | TTATAGATTCTATGCAGCCA | 18 | 393 |
| 1323180 | 26958 | 26977 | N/A | N/A | TCAGGTTAACTATCACCCCA | 77 | 394 |
| 1323274 | 28482 | 28501 | 1229 | 1248 | CAGTGGATAATCCTGGATCA | 27 | 395 |
| 1323281 | 14019 | 14038 | N/A | N/A | ACATCATCACAAATAATTGA | 85 | 396 |
| 1323310 | 25824 | 25843 | N/A | N/A | TGAATTAACAATCAAGGCCT | 94 | 397 |
| 1323311 | 24243 | 24262 | N/A | N/A | AGGTAGTTCATTTTCAACTA | 29 | 398 |

TABLE 6
Reduction of IFNAR1 RNA by 5-10-5 MOE gapmers with mixed PO/PS internucleoside linkages
in A431 cells

| | SEQ ID | SEQ ID | SEQ ID | SEQ ID | | | |
|---|---|---|---|---|---|---|---|
| | NO 1 | NO 1 | NO 2 | NO 2 | | IFNAR1 | |
| Compound | Start | Stop | Start | Stop | | (% | SEQ ID |
| Number | Site | Site | Site | Site | Sequence (5' to 3') | UTC) | NO |
| 1320917 | 4798 | 4817 | N/A | N/A | TCTCTTTTTCTCTTCAAGAC | 92 | 399 |
| 1320948 | 18368 | 18387 | N/A | N/A | ACCAAAAATATACACTAGCA | 57 | 400 |
| 1320955 | 35349 | 35368 | 2621 | 2640 | TCAGACTTTCCTAAATAAAT | 61 | 401 |
| 1320983 | 17135 | 17154 | N/A | N/A | ACCATTTTTTCACATACTTG | 20 | 402 |
| 1320998 | 38790 | 38809 | 6062 | 6081 | GGGATGATTTATTTATTATT | 53 | 403 |
| 1321043 | 27289 | 27308 | N/A | N/A | TGGTGGGAATATTTATATCA | 35 | 404 |
| 1321059 | 29175 | 29194 | N/A | N/A | ACAGCCCCCTCCCAAGGAAC | 87 | 405 |
| 1321125 | 24589 | 24608 | N/A | N/A | ATATTAGAATCCATCTATTT | 82 | 406 |
| 1321152 | 8429 | 8448 | N/A | N/A | AGGTCTCCCCATCCTCAATT | 75 | 407 |
| 1321156 | 35789 | 35808 | 3061 | 3080 | AAGCCAGCGACCTTTTTCCT | 60 | 408 |
| 1321241 | 35642 | 35661 | 2914 | 2933 | TACAACAATTATTTCTCTAA | 80 | 409 |
| 1321296 | 32006 | 32025 | N/A | N/A | CTTTCTATATATTTTTTGCA | 67 | 410 |
| 1321325 | 30063 | 30082 | N/A | N/A | TTGATATATTATCCAGTATA | 46 | 411 |
| 1321382 | 38326 | 38345 | 5598 | 5617 | TGTTGCATACAAATTCACTA | 82 | 412 |
| 1321435 | 5113 | 5132 | N/A | N/A | GTATGACTATTTTTATGACT | 43 | 413 |
| 1321442 | 21108 | 21127 | N/A | N/A | TCCTTTACATTCTTAAAGGA | 84 | 414 |
| 1321475 | 25628 | 25647 | N/A | N/A | CTGACTCTTTCCATTTCTTC | 38 | 415 |
| 1321497 | 30510 | 30529 | N/A | N/A | TATAGATAACAAAACTGCCT | 80 | 416 |
| 1321501 | 11906 | 11925 | N/A | N/A | TATGCCTCTTACCTTTTCTC | 56 | 417 |
| 1321505 | 34330 | 34349 | 1602 | 1621 | GCAGAAGATTCTTCAATGGC | 35 | 418 |
| 1321600 | 18158 | 18177 | N/A | N/A | CAACCCAACCTCACTGTTTA | 82 | 419 |
| 1321636 | 9569 | 9588 | N/A | N/A | ATCTTGCTAACATCACTCTC | 95 | 420 |
| 1321694 | 22526 | 22545 | N/A | N/A | TCAATCCTTTCCTATAACAC | 61 | 421 |
| 1321703 | 29703 | 29722 | N/A | N/A | GCTTAGATTTCCAATAGAAA | 7 | 422 |
| 1321715 | 32957 | 32976 | N/A | N/A | TACTATCTCATGCTATGTTA | 68 | 423 |
| 1321731 | 10691 | 10710 | N/A | N/A | AATCTTGGAATAGCTAGGGA | 73 | 424 |
| 1321745 | 25174 | 25193 | N/A | N/A | TTCCTCTTCTCTTTTCTCTA | 61 | 425 |
| 1321758 | 30204 | 30223 | N/A | N/A | AAGTATTTGCCAAACAGCAA | 63 | 426 |
| 1321791 | 19863 | 19882 | N/A | N/A | AGTTATTTCTATTTTTGGTT | 74 | 427 |
| 1321853 | 22808 | 22827 | N/A | N/A | TCCCAAGTAACATTTATTTT | 81 | 428 |
| 1321922 | 6204 | 6223 | N/A | N/A | GCTTTTTTCACATCAAACCA | 60 | 429 |
| 1321961 | 27046 | 27065 | N/A | N/A | GACTGGTTTCCTTATCTCTC | 63 | 430 |
| 1321980 | 13645 | 13664 | N/A | N/A | TGGGTCTTCCCCAGAAGCCA | 97 | 431 |
| 1322003 | 29467 | 29486 | N/A | N/A | ATTTTTTCCTAATCCTTCCC | 89 | 432 |
| 1322019 | 7665 | 7684 | N/A | N/A | GATAGTTTTCTTAATCTAGA | 80 | 433 |
| 1322084 | 6941 | 6960 | N/A | N/A | AGGACATCCCAGACATTCCT | 89 | 434 |
| 1322176 | 24313 | 24332 | 888 | 907 | TTGCATATGTATAATCCCAT | 6 | 132 |
| 1322260 | 37033 | 37052 | 4305 | 4324 | CCGTATTTTCCCTTCTCCAC | 24 | 435 |
| 1322322 | 9254 | 9273 | N/A | N/A | GTGTAACAACAACAACCGCC | 93 | 436 |
| 1322323 | 36069 | 36088 | 3341 | 3360 | TAGCAAGTAATTTAAAACTA | 94 | 437 |
| 1322381 | 38042 | 38061 | 5314 | 5333 | TCCCTGTTTTCTTGGAGCCT | 60 | 438 |
| 1322402 | 25224 | 25243 | N/A | N/A | TTCTTTCCATCTCTTTTCTC | 73 | 439 |
| 1322424 | 22310 | 22329 | 566 | 585 | GATGTGTATCACTATTGCCT | 6 | 440 |
| 1322552 | 26868 | 26887 | N/A | N/A | GCTTTCTTCCCATTGCCACC | 89 | 441 |
| 1322558 | 14018 | 14037 | N/A | N/A | CATCATCACAAATAATTGAC | 100 | 442 |
| 1322574 | 31735 | 31754 | N/A | N/A | GAAAATATAATTAAATCACT | 87 | 443 |
| 1322634 | 37370 | 37389 | 4642 | 4661 | TCTAAGAACTATCAATATGC | 73 | 444 |
| 1322636 | 29957 | 29976 | N/A | N/A | AACCTTATAAACATCCTTTT | 55 | 445 |
| 1322645 | 24839 | 24858 | N/A | N/A | TTTCCAACTTTCTTTCCCAC | 50 | 446 |
| 1322648 | 33865 | 33884 | N/A | N/A | TATGAATATTACAGTACACA | 62 | 447 |
| 1322715 | 28590 | 28609 | N/A | N/A | AGCTTTATTTACCCAAATCA | 51 | 448 |
| 1322724 | 28452 | 28471 | 1199 | 1218 | TCCAGACTGTTTTGGAGCAC | 31 | 449 |
| 1322795 | 25808 | 25827 | N/A | N/A | GCCTTGTTCATACCTTATCT | 38 | 450 |
| 1322796 | 31071 | 31090 | N/A | N/A | CATTATTTAATTTCTCTCTA | 80 | 451 |
| 1322847 | 15611 | 15630 | N/A | N/A | TTCAAGATATACCCTAGCTC | 70 | 452 |
| 1322863 | 13413 | 13432 | N/A | N/A | CACTTTGAATACACTGGTCT | 83 | 453 |
| 1322881 | 8748 | 8767 | N/A | N/A | GTATCCAGCATAATGGTGCA | 78 | 454 |
| 1322893 | 25499 | 25518 | N/A | N/A | GAGGTATACACAAAAGACTA | 66 | 455 |
| 1322913 | 16361 | 16380 | N/A | N/A | TGTTCCCTTCTATATTCCTC | 47 | 456 |
| 1322937 | 24241 | 24260 | N/A | N/A | GTAGTTCATTTTCAACTAGA | 52 | 457 |
| 1323004 | 25335 | 25354 | N/A | N/A | CCCTTCTCCCTCATTTTTTC | 77 | 458 |
| 1323040 | 5902 | 5921 | N/A | N/A | CACTCTCTATCAACCTTGTA | 89 | 459 |
| 1323055 | 11495 | 11514 | N/A | N/A | AGAGAGTTCTTACTTTCCTT | 102 | 460 |
| 1323057 | 26957 | 26976 | N/A | N/A | CAGGTTAACTATCACCCCAA | 64 | 461 |
| 1323075 | 31286 | 31305 | N/A | N/A | ACCACTATAACCAAATCAGA | 44 | 462 |
| 1323112 | 20165 | 20184 | N/A | N/A | TTTTTCTTACCTTTGCGAAA | 94 | 463 |
| 1323124 | 19310 | 19329 | N/A | N/A | GATGATTCCCTTCTGACCTC | 48 | 464 |
| 1323126 | 34648 | 34667 | 1920 | 1939 | TTTCTTTCCCTAAACAGGGA | 108 | 465 |
| 1323141 | 25117 | 25136 | N/A | N/A | TGCAGTTCTCTTTTATCAGC | 16 | 466 |
| 1323191 | 27547 | 27566 | N/A | N/A | GCCTCCTAAAATACAAACTG | 79† | 467 |
| 1323219 | 25743 | 25762 | N/A | N/A | ACATTTTCAATTTCTGCAAC | 50 | 468 |
| 1323240 | 26563 | 26582 | N/A | N/A | CTTAAAAGAGGATCTAGGCC | 79 | 469 |
| 1323263 | 20500 | 20519 | N/A | N/A | ACCATATCACCACATCACAC | 61 | 470 |
| 1323299 | 12427 | 12446 | N/A | N/A | TTAATTCTTTTCTCTTTCTC | 81 | 471 |
| 1323318 | 28942 | 28961 | N/A | N/A | ATTTTGTTAATATCTGAGTT | 34 | 472 |
| 1323321 | 8261 | 8280 | N/A | N/A | ACAGAGTTTAACAAAAGATC | 83 | 473 |
| 1323330 | 28116 | 28135 | 961 | 980 | TTCCATTTATACAAATGGTT | 101† | 474 |
| 1323336 | 33549 | 33568 | N/A | N/A | GTGTCATAAAAAAAGTCTCA | 50 | 475 |

TABLE 7
Reduction of IFNAR1 RNA by 5-10-5 MOE gapmers with mixed PO/PS internucleoside linkages
in A431 cells

| | SEQ ID | SEQ ID | SEQ ID | SEQ ID | | | |
|---|---|---|---|---|---|---|---|
| | NO 1 | NO 1 | NO 2 | NO 2 | | IFNAR1 | |
| Compound | Start | Stop | Start | Stop | | (% | SEQ ID |
| Number | Site | Site | Site | Site | Sequence (5' to 3') | UTC) | NO |
| 1320920 | 8733 | 8752 | N/A | N/A | GTGCATTCACAGGAACTCCT | 54 | 476 |
| 1320933 | 33807 | 33826 | N/A | N/A | TTGTTAATATTTACGGAGCA | 59 | 477 |
| 1320968 | 31946 | 31965 | N/A | N/A | GAATTACTTTTATTATGTCT | 50 | 478 |
| 1320991 | 32947 | 32966 | N/A | N/A | TGCTATGTTATTACATGAAA | 43 | 479 |
| 1321008 | 31731 | 31750 | N/A | N/A | ATATAATTAAATCACTGATA | 99 | 480 |
| 1321105 | 29466 | 29485 | N/A | N/A | TTTTTTCCTAATCCTTCCCC | 92 | 481 |
| 1321124 | 28588 | 28607 | N/A | N/A | CTTTATTTACCCAAATCATA | 72 | 482 |
| 1321127 | 30059 | 30078 | N/A | N/A | TATATTATCCAGTATAGGTT | 65 | 483 |
| 1321180 | 4797 | 4816 | N/A | N/A | CTCTTTTTCTCTTCAAGACA | 94 | 484 |
| 1321221 | 36068 | 36087 | 3340 | 3359 | AGCAAGTAATTTAAAACTAA | 86 | 485 |
| 1321243 | 35788 | 35807 | 3060 | 3079 | AGCCAGCGACCTTTTTCCTA | 32 | 486 |
| 1321247 | 22525 | 22544 | N/A | N/A | CAATCCTTTCCTATAACACA | 86 | 487 |
| 1321293 | 11904 | 11923 | N/A | N/A | TGCCTCTTACCTTTTCTCCT | 73 | 488 |
| 1321313 | 22806 | 22825 | N/A | N/A | CCAAGTAACATTTATTTTGC | 57 | 489 |
| 1321318 | 12426 | 12445 | N/A | N/A | TAATTCTTTTCTCTTTCTCC | 109 | 490 |
| 1321429 | 27045 | 27064 | N/A | N/A | ACTGGTTTCCTTATCTCTCT | 46 | 491 |
| 1321434 | 8232 | 8251 | N/A | N/A | TTGTAGTATTTACAATATCT | 48 | 492 |
| 1321489 | 18367 | 18386 | N/A | N/A | CCAAAAATATACACTAGCAT | 72 | 493 |
| 1321515 | 38322 | 38341 | 5594 | 5613 | GCATACAAATTCACTAAGTA | 31 | 494 |
| 1321583 | 34647 | 34666 | 1919 | 1938 | TTCTTTCCCTAAACAGGGAA | 97 | 495 |
| 1321606 | 10635 | 10654 | N/A | N/A | GCAGCAGCAAGTACTACAAA | 62 | 496 |
| 1321645 | 5901 | 5920 | N/A | N/A | ACTCTCTATCAACCTTGTAA | 73 | 497 |
| 1321665 | 29169 | 29188 | N/A | N/A | CCCTCCCAAGGAACTATCCA | 91 | 498 |
| 1321685 | 13367 | 13386 | N/A | N/A | GATCATGTTATCAAAGATCC | 113 | 499 |
| 1321710 | 6936 | 6955 | N/A | N/A | ATCCCAGACATTCCTTTCCA | 76 | 500 |
| 1321721 | 6203 | 6222 | N/A | N/A | CTTTTTTCACATCAAACCAA | 69 | 501 |
| 1321787 | 24240 | 24259 | N/A | N/A | TAGTTCATTTTCAACTAGAA | 71 | 502 |
| 1321804 | 27287 | 27306 | N/A | N/A | GTGGGAATATTTATATCATA | 36 | 503 |
| 1321851 | 37924 | 37943 | 5196 | 5215 | TCTGCACACCTAAACCCCTT | 69 | 504 |
| 1321865 | 33511 | 33530 | N/A | N/A | TTTGTATGATTTCATCCATA | 35 | 505 |
| 1321873 | 24838 | 24857 | N/A | N/A | TTCCAACTTTCTTTCCCACC | 27 | 506 |
| 1321893 | 19841 | 19860 | N/A | N/A | AGAGTTATTTCTTCTACTTG | 45 | 507 |
| 1321931 | 18151 | 18170 | N/A | N/A | ACCTCACTGTTTACATCTGT | 76 | 508 |
| 1321934 | 26852 | 26871 | N/A | N/A | CACCTGGTGTCCAAATGTTC | 83 | 509 |
| 1321953 | 9253 | 9272 | N/A | N/A | TGTAACAACAACAACCGCCC | 98 | 510 |
| 1321966 | 27545 | 27564 | N/A | N/A | CTCCTAAAATACAAACTGGT | 95 | 511 |
| 1321975 | 21107 | 21126 | N/A | N/A | CCTTTACATTCTTAAAGGAA | 101 | 512 |
| 1322100 | 29702 | 29721 | N/A | N/A | CTTAGATTTCCAATAGAAAA | 54 | 513 |
| 1322114 | 34329 | 34348 | 1601 | 1620 | CAGAAGATTCTTCAATGGCT | 44 | 514 |
| 1322150 | 20138 | 20157 | 487 | 506 | AATGAGTCAACCTCATACCA | 92 | 515 |
| 1322176 | 24313 | 24332 | 888 | 907 | TTGCATATGTATAATCCCAT | 6 | 132 |
| 1322178 | 8428 | 8447 | N/A | N/A | GGTCTCCCCATCCTCAATTT | 96 | 516 |
| 1322228 | 31070 | 31089 | N/A | N/A | ATTATTTAATTTCTCTCTAC | 91 | 517 |
| 1322240 | 25171 | 25190 | N/A | N/A | CTCTTCTCTTTTCTCTATTC | 68 | 518 |
| 1322251 | 37369 | 37388 | 4641 | 4660 | CTAAGAACTATCAATATGCT | 90 | 519 |
| 1322294 | 15610 | 15629 | N/A | N/A | TCAAGATATACCCTAGCTCA | 81 | 520 |
| 1322315 | 7663 | 7682 | N/A | N/A | TAGTTTTCTTAATCTAGAGT | 68 | 521 |
| 1322321 | 28441 | 28460 | 1188 | 1207 | TTGGAGCACCGATATAGATA | 15 | 522 |
| 1322338 | 30509 | 30528 | N/A | N/A | ATAGATAACAAAACTGCCTT | 65 | 523 |
| 1322423 | 31285 | 31304 | N/A | N/A | CCACTATAACCAAATCAGAA | 47 | 524 |
| 1322428 | 22309 | 22328 | 565 | 584 | ATGTGTATCACTATTGCCTT | 6 | 525 |
| 1322483 | 26956 | 26975 | N/A | N/A | AGGTTAACTATCACCCCAAC | 83 | 526 |
| 1322489 | 35640 | 35659 | 2912 | 2931 | CAACAATTATTTCTCTAATT | 96 | 527 |
| 1322618 | 5096 | 5115 | N/A | N/A | ACTTCTGAAAGACTGAGCAA | 55 | 528 |
| | 7602 | 7621 | | | | | |
| 1322622 | 9568 | 9587 | N/A | N/A | TCTTGCTAACATCACTCTCC | 77 | 529 |
| 1322688 | 29954 | 29973 | N/A | N/A | CTTATAAACATCCTTTTGAA | 66 | 530 |
| 1322713 | 25477 | 25496 | N/A | N/A | GAACAGTTTCCTGATTGGTT | 17 | 531 |
| 1322718 | 25807 | 25826 | N/A | N/A | CCTTGTTCATACCTTATCTC | 37 | 532 |
| 1322735 | 37032 | 37051 | 4304 | 4323 | CGTATTTTCCCTTCTCCACA | 39 | 533 |
| 1322739 | 24588 | 24607 | N/A | N/A | TATTAGAATCCATCTATTTT | 98 | 534 |
| 1322831 | 20499 | 20518 | N/A | N/A | CCATATCACCACATCACACA | 74 | 535 |
| 1322907 | 28103 | 28122 | 948 | 967 | AATGGTTTCCAGGATTCCTT | 30† | 536 |
| 1322974 | 38789 | 38808 | 6061 | 6080 | GGATGATTTATTTATTATTT | 90 | 537 |
| 1323071 | 25116 | 25135 | N/A | N/A | GCAGTTCTCTTTTATCAGCT | 6 | 538 |
| 1323072 | 26105 | 26124 | N/A | N/A | GAGGTCAGACTCTCCCTTCC | 87 | 539 |
| 1323098 | 25730 | 25749 | N/A | N/A | CTGCAACCCTTATAATTTGT | 21 | 540 |
| 1323119 | 25223 | 25242 | N/A | N/A | TCTTTCCATCTCTTTTCTCC | 69 | 541 |
| 1323147 | 14017 | 14036 | N/A | N/A | ATCATCACAAATAATTGACC | 88 | 542 |
| 1323150 | 30199 | 30218 | N/A | N/A | TTTGCCAAACAGCAATGTAA | 82 | 543 |
| 1323157 | 13644 | 13663 | N/A | N/A | GGGTCTTCCCCAGAAGCCAT | 87 | 544 |
| 1323168 | 17134 | 17153 | N/A | N/A | CCATTTTTTCACATACTTGT | 49 | 545 |
| 1323171 | 16360 | 16379 | N/A | N/A | GTTCCCTTCTATATTCCTCC | 41 | 546 |
| 1323172 | 25625 | 25644 | N/A | N/A | ACTCTTTCCATTTCTTCAGT | 44 | 547 |
| 1323179 | 35345 | 35364 | 2617 | 2636 | ACTTTCCTAAATAAATTTCC | 76 | 548 |
| 1323184 | 11429 | 11448 | N/A | N/A | GTTGATAGGATAATTACCTC | 81 | 549 |
| 1323244 | 28941 | 28960 | N/A | N/A | TTTTGTTAATATCTGAGTTA | 65 | 550 |
| 1323248 | 19285 | 19304 | N/A | N/A | ATGAATAGACTTACCTTCCC | 96 | 551 |
| 1323349 | 25334 | 25353 | N/A | N/A | CCTTCTCCCTCATTTTTTCT | 73 | 552 |

TABLE 8
Reduction of IFNAR1 RNA by 5-10-5 MOE gapmers with mixed PO/PS internucleoside linkages
in A431 cells

| | SEQ ID | SEQ ID | SEQ ID | SEQ ID | | | |
|---|---|---|---|---|---|---|---|
| | NO 1 | NO 1 | NO 2 | NO 2 | | IFNAR1 | |
| Compound | Start | Stop | Start | Stop | | (% | SEQ ID |
| Number | Site | Site | Site | Site | Sequence (5' to 3') | UTC) | NO |
| 1320946 | 27286 | 27305 | N/A | N/A | TGGGAATATTTATATCATAA | 12 | 553 |
| 1320957 | 4788 | 4807 | N/A | N/A | TCTTCAAGACACTCATGGTA | 87 | 554 |
| 1320987 | 32889 | 32908 | N/A | N/A | AGATACCCAAATCAGTCTCT | 65 | 555 |
| 1321086 | 8731 | 8750 | N/A | N/A | GCATTCACAGGAACTCCTTA | 51 | 556 |
| 1321099 | 10628 | 10647 | N/A | N/A | CAAGTACTACAAAATGGTGA | 86 | 557 |
| 1321142 | 9252 | 9271 | N/A | N/A | GTAACAACAACAACCGCCCA | 93 | 558 |
| 1321191 | 25806 | 25825 | N/A | N/A | CTTGTTCATACCTTATCTCT | 52 | 559 |
| 1321208 | 34582 | 34601 | 1854 | 1873 | CCCAGTGTAACTCCTGCTGA | 82 | 560 |
| 1321238 | 28098 | 28117 | 943 | 962 | TTTCCAGGATTCCTTTTTAA | 33† | 561 |
| 1321257 | 28582 | 28601 | N/A | N/A | TTACCCAAATCATAATTATA | 95 | 562 |
| 1321276 | 20498 | 20517 | N/A | N/A | CATATCACCACATCACACAT | 77 | 563 |
| 1321316 | 16357 | 16376 | N/A | N/A | CCCTTCTATATTCCTCCTTC | 60 | 564 |
| 1321412 | 22524 | 22543 | N/A | N/A | AATCCTTTCCTATAACACAA | 69 | 565 |
| 1321469 | 37368 | 37387 | 4640 | 4659 | TAAGAACTATCAATATGCTA | 91 | 566 |
| 1321506 | 31730 | 31749 | N/A | N/A | TATAATTAAATCACTGATAA | 98 | 567 |
| 1321533 | 35639 | 35658 | 2911 | 2930 | AACAATTATTTCTCTAATTA | 100 | 568 |
| 1321579 | 25222 | 25241 | N/A | N/A | CTTTCCATCTCTTTTCTCCC | 55 | 569 |
| 1321595 | 8425 | 8444 | N/A | N/A | CTCCCCATCCTCAATTTTCT | 96 | 570 |
| 1321625 | 25115 | 25134 | N/A | N/A | CAGTTCTCTTTTATCAGCTT | 1 | 571 |
| 1321676 | 22805 | 22824 | N/A | N/A | CAAGTAACATTTATTTTGCT | 86 | 572 |
| 1321719 | 5878 | 5897 | N/A | N/A | TTGCCATTCCCCCATGCATC | 95 | 573 |
| 1321738 | 31941 | 31960 | N/A | N/A | ACTTTTATTATGTCTAGCTA | 67 | 574 |
| 1321866 | 13339 | 13358 | N/A | N/A | TGACAAGTCACTTCTCTGTC | 99 | 575 |
| 1321892 | 29673 | 29692 | N/A | N/A | GTTAAAGAATTTACCAGCCT | 44 | 576 |
| 1321948 | 25430 | 25449 | N/A | N/A | ACATATGCACATAAATGCAT | 98 | 577 |
| 1321958 | 19283 | 19302 | N/A | N/A | GAATAGACTTACCTTCCCTA | 81 | 578 |
| 1321989 | 14848 | 14867 | N/A | N/A | GCTGTCTACCACCCTCATCC | 77 | 579 |
| 1321993 | 12387 | 12406 | N/A | N/A | AGAGAGTTTTATACTTTTCC | 62 | 580 |
| 1322116 | 25729 | 25748 | N/A | N/A | TGCAACCCTTATAATTTGTA | 46 | 581 |
| 1322134 | 33508 | 33527 | N/A | N/A | GTATGATTTCATCCATAGAA | 19 | 582 |
| 1322163 | 37031 | 37050 | 4303 | 4322 | GTATTTTCCCTTCTCCACAT | 44 | 583 |
| 1322176 | 24313 | 24332 | 888 | 907 | TTGCATATGTATAATCCCAT | 6 | 132 |
| 1322222 | 11903 | 11922 | N/A | N/A | GCCTCTTACCTTTTCTCCTC | 69 | 584 |
| 1322229 | 27543 | 27562 | N/A | N/A | CCTAAAATACAAACTGGTTT | 93 | 585 |
| 1322336 | 19838 | 19857 | N/A | N/A | GTTATTTCTTCTACTTGAGC | 45 | 586 |
| 1322364 | 25623 | 25642 | N/A | N/A | TCTTTCCATTTCTTCAGTGC | 18 | 587 |
| 1322426 | 35344 | 35363 | 2616 | 2635 | CTTTCCTAAATAAATTTCCT | 91 | 588 |
| 1322447 | 37923 | 37942 | 5195 | 5214 | CTGCACACCTAAACCCCTTA | 55 | 589 |
| 1322473 | 24587 | 24606 | N/A | N/A | ATTAGAATCCATCTATTTTA | 75 | 590 |
| 1322476 | 6195 | 6214 | N/A | N/A | ACATCAAACCAAACATGAGT | 82 | 591 |
| 1322481 | 38788 | 38807 | 6060 | 6079 | GATGATTTATTTATTATTTG | 97 | 592 |
| 1322485 | 26954 | 26973 | N/A | N/A | GTTAACTATCACCCCAACAC | 97 | 593 |
| 1322505 | 8231 | 8250 | N/A | N/A | TGTAGTATTTACAATATCTT | 48 | 594 |
| 1322507 | 6935 | 6954 | N/A | N/A | TCCCAGACATTCCTTTCCAT | 75 | 595 |
| 1322510 | 13608 | 13627 | N/A | N/A | TGCACTGTCCCCTCTGTCTA | 93 | 596 |
| 1322524 | 29166 | 29185 | N/A | N/A | TCCCAAGGAACTATCCAGCC | 94 | 597 |
| 1322547 | 20137 | 20156 | 486 | 505 | ATGAGTCAACCTCATACCAT | 88 | 598 |
| 1322561 | 24237 | 24256 | N/A | N/A | TTCATTTTCAACTAGAAGCC | 87 | 599 |
| 1322571 | 34327 | 34346 | 1599 | 1618 | GAAGATTCTTCAATGGCTGT | 57 | 600 |
| 1322585 | 30192 | 30211 | N/A | N/A | AACAGCAATGTAACCAATCA | 71 | 601 |
| 1322673 | 17109 | 17128 | N/A | N/A | ACTGTATGTTTTCTTTTGAA | 34 | 602 |
| 1322675 | 14016 | 14035 | N/A | N/A | TCATCACAAATAATTGACCA | 92 | 603 |
| 1322685 | 11426 | 11445 | N/A | N/A | GATAGGATAATTACCTCTTC | 78 | 604 |
| 1322708 | 38321 | 38340 | 5593 | 5612 | CATACAAATTCACTAAGTAC | 89 | 605 |
| 1322719 | 18149 | 18168 | N/A | N/A | CTCACTGTTTACATCTGTCT | 69 | 606 |
| 1322725 | 22308 | 22327 | 564 | 583 | TGTGTATCACTATTGCCTTA | 5 | 607 |
| 1322770 | 31067 | 31086 | N/A | N/A | ATTTAATTTCTCTCTACCTG | 79 | 608 |
| 1322771 | 28930 | 28949 | N/A | N/A | TCTGAGTTAATCACATTTTT | 32 | 609 |
| 1322781 | 31284 | 31303 | N/A | N/A | CACTATAACCAAATCAGAAA | 85 | 610 |
| 1322785 | 25332 | 25351 | N/A | N/A | TTCTCCCTCATTTTTTCTGT | 78 | 611 |
| 1322789 | 35784 | 35803 | 3056 | 3075 | AGCGACCTTTTTCCTAGGGA | 23 | 612 |
| 1322791 | 30042 | 30061 | N/A | N/A | GTTAAGATGGCAACTACAAT | 46 | 613 |
| 1322794 | 5089 | 5108 | N/A | N/A | AAAGACTGAGCAACATTACA | 62 | 614 |
| | 7595 | 7614 | | | | | |
| 1322860 | 27044 | 27063 | N/A | N/A | CTGGTTTCCTTATCTCTCTT | 48 | 615 |
| 1322886 | 26835 | 26854 | N/A | N/A | TTCTGCTACTCTAGAAGGAC | 81 | 616 |
| 1322933 | 28436 | 28455 | 1183 | 1202 | GCACCGATATAGATATGGAA | 35 | 617 |
| 1323060 | 29951 | 29970 | N/A | N/A | ATAAACATCCTTTTGAAAAA | 102 | 618 |
| 1323079 | 33793 | 33812 | N/A | N/A | GGAGCATTTTTAGAGTGGTA | 27 | 619 |
| 1323132 | 29465 | 29484 | N/A | N/A | TTTTTCCTAATCCTTCCCCC | 90 | 620 |
| 1323146 | 25170 | 25189 | N/A | N/A | TCTTCTCTTTTCTCTATTCA | 66 | 621 |
| 1323151 | 21106 | 21125 | N/A | N/A | CTTTACATTCTTAAAGGAAT | 100 | 622 |
| 1323158 | 18352 | 18371 | N/A | N/A | AGCATATGAAATACTTCATT | 52 | 623 |
| 1323218 | 9567 | 9586 | N/A | N/A | CTTGCTAACATCACTCTCCC | 87 | 624 |
| 1323230 | 36065 | 36084 | 3337 | 3356 | AAGTAATTTAAAACTAAGTT | 107 | 625 |
| 1323245 | 30508 | 30527 | N/A | N/A | TAGATAACAAAACTGCCTTA | 80 | 626 |
| 1323266 | 26102 | 26121 | N/A | N/A | GTCAGACTCTCCCTTCCTGA | 62 | 627 |
| 1323268 | 24835 | 24854 | N/A | N/A | CAACTTTCTTTCCCACCGAA | 54 | 628 |
| 1323302 | 7662 | 7681 | N/A | N/A | AGTTTTCTTAATCTAGAGTC | 62 | 629 |

TABLE 9
Reduction of IFNAR1 RNA by 5-10-5 MOE gapmers with mixed PO/PS internucleoside linkages
in A431 cells

| | SEQ ID | SEQ ID | SEQ ID | SEQ ID | | | |
|---|---|---|---|---|---|---|---|
| | NO 1 | NO 1 | NO 2 | NO 2 | | IFNAR1 | |
| Compound | Start | Stop | Start | Stop | | (% | SEQ ID |
| Number | Site | Site | Site | Site | Sequence (5' to 3') | UTC) | NO |
| 1320911 | 26096 | 26115 | N/A | N/A | CTCTCCCTTCCTGATGGCCT | 85 | 630 |
| 1320959 | 19820 | 19839 | N/A | N/A | GCTAATGTCCTATTAACATT | 48 | 631 |
| 1320963 | 27276 | 27295 | N/A | N/A | TATATCATAAAAATCAGCAA | 67 | 632 |
| 1320988 | 33507 | 33526 | N/A | N/A | TATGATTTCATCCATAGAAT | 56 | 633 |
| 1321010 | 6926 | 6945 | N/A | N/A | TTCCTTTCCATTGATTTCAA | 68 | 634 |
| 1321047 | 30189 | 30208 | N/A | N/A | AGCAATGTAACCAATCACAT | 52 | 635 |
| 1321048 | 19239 | 19258 | N/A | N/A | TTTCAAGGTTTCCTCTGCCC | 61 | 636 |
| 1321051 | 18139 | 18158 | N/A | N/A | ACATCTGTCTTTCCTACTTC | 79 | 637 |
| 1321071 | 25096 | 25115 | N/A | N/A | TTTTAAAAATTTTAATGCTT | 89 | 638 |
| 1321075 | 6171 | 6190 | N/A | N/A | TGCAAGTTTTTCATAAACAA | 57 | 639 |
| 1321090 | 29574 | 29593 | N/A | N/A | CTGACGGTATATATTATCTT | 12 | 640 |
| 1321113 | 26953 | 26972 | N/A | N/A | TTAACTATCACCCCAACACA | 84 | 641 |
| 1321122 | 30039 | 30058 | N/A | N/A | AAGATGGCAACTACAATTTA | 52 | 642 |
| 1321145 | 25805 | 25824 | N/A | N/A | TTGTTCATACCTTATCTCTT | 41 | 643 |
| 1321169 | 35631 | 35650 | 2903 | 2922 | TTTCTCTAATTAGATAGTTA | 70 | 644 |
| 1321197 | 9566 | 9585 | N/A | N/A | TTGCTAACATCACTCTCCCA | 77 | 645 |
| 1321211 | 21085 | 21104 | N/A | N/A | ATCGAGAATCCCAAACAGCC | 67 | 646 |
| 1321236 | 10421 | 10440 | N/A | N/A | ATAGGATACTACATCAGCTC | 59 | 647 |
| 1321260 | 13338 | 13357 | N/A | N/A | GACAAGTCACTTCTCTGTCT | 94 | 648 |
| 1321268 | 31282 | 31301 | N/A | N/A | CTATAACCAAATCAGAAAGT | 76 | 649 |
| 1321275 | 8724 | 8743 | N/A | N/A | CAGGAACTCCTTAAATATCA | 79 | 650 |
| 1321306 | 9205 | 9224 | N/A | N/A | AGCAATGACCAATCAAGAGC | 57 | 651 |
| 1321317 | 18351 | 18370 | N/A | N/A | GCATATGAAATACTTCATTC | 27 | 652 |
| 1321323 | 16356 | 16375 | N/A | N/A | CCTTCTATATTCCTCCTTCT | 60 | 653 |
| 1321401 | 8227 | 8246 | N/A | N/A | GTATTTACAATATCTTGTGC | 35 | 654 |
| 1321461 | 20497 | 20516 | N/A | N/A | ATATCACCACATCACACATC | 84 | 655 |
| 1321586 | 31886 | 31905 | 1419 | 1438 | GTTTTGTTTTCTCACATACA | 43 | 656 |
| 1321614 | 38319 | 38338 | 5591 | 5610 | TACAAATTCACTAAGTACAA | 97 | 657 |
| 1321628 | 22804 | 22823 | N/A | N/A | AAGTAACATTTATTTTGCTT | 63 | 658 |
| 1321648 | 24236 | 24255 | N/A | N/A | TCATTTTCAACTAGAAGCCA | 75 | 659 |
| 1321713 | 28421 | 28440 | 1168 | 1187 | TGGAATGAATCACTAAGGGA | 2 | 660 |
| 1321718 | 37029 | 37048 | 4301 | 4320 | ATTTTCCCTTCTCCACATCC | 70 | 661 |
| 1321744 | 5850 | 5869 | N/A | N/A | GTATGAAGAATTTCAGCAAA | 62 | 662 |
| 1321752 | 11901 | 11920 | N/A | N/A | CTCTTACCTTTTCTCCTCTT | 67 | 663 |
| 1321810 | 13974 | 13993 | N/A | N/A | CAAGCAGTGCCTCTGAGCCC | 99 | 664 |
| 1321842 | 25429 | 25448 | N/A | N/A | CATATGCACATAAATGCATT | 88 | 665 |
| 1321903 | 25318 | 25337 | N/A | N/A | TTCTGTTTCTTTCCAGTTTC | 50 | 666 |
| 1321924 | 32875 | 32894 | N/A | N/A | GTCTCTATTATTTTCTGGAT | 31 | 667 |
| 1321949 | 31066 | 31085 | N/A | N/A | TTTAATTTCTCTCTACCTGA | 71 | 668 |
| 1321976 | 26825 | 26844 | N/A | N/A | CTAGAAGGACATCCTCCCCA | 90 | 669 |
| 1321999 | 25169 | 25188 | N/A | N/A | CTTCTCTTTTCTCTATTCAT | 63 | 670 |
| 1322099 | 28581 | 28600 | N/A | N/A | TACCCAAATCATAATTATAA | 91 | 671 |
| 1322105 | 24832 | 24851 | N/A | N/A | CTTTCTTTCCCACCGAAGTA | 60 | 672 |
| 1322118 | 25220 | 25239 | N/A | N/A | TTCCATCTCTTTTCTCCCCA | 44 | 673 |
| 1322125 | 29464 | 29483 | N/A | N/A | TTTTCCTAATCCTTCCCCCA | 82 | 674 |
| 1322176 | 24313 | 24332 | 888 | 907 | TTGCATATGTATAATCCCAT | 23 | 132 |
| 1322186 | 14845 | 14864 | N/A | N/A | GTCTACCACCCTCATCCCCA | 88 | 675 |
| 1322202 | 25621 | 25640 | N/A | N/A | TTTCCATTTCTTCAGTGCTT | 9 | 676 |
| 1322270 | 22300 | 22319 | 556 | 575 | ACTATTGCCTTATCTTCAGC | 35 | 677 |
| 1322309 | 7661 | 7680 | N/A | N/A | GTTTTCTTAATCTAGAGTCC | 53 | 678 |
| 1322317 | 37890 | 37909 | 5162 | 5181 | GCTGCTGCAAATATCACGGC | 88 | 679 |
| 1322392 | 17084 | 17103 | N/A | N/A | TCTATTCCTATCTTTTGCCT | 82 | 680 |
| 1322421 | 28097 | 28116 | 942 | 961 | TTCCAGGATTCCTTTTTAAA | 41† | 681 |
| 1322449 | 35783 | 35802 | 3055 | 3074 | GCGACCTTTTTCCTAGGGAA | 30 | 682 |
| 1322477 | 13591 | 13610 | N/A | N/A | CTAGTGCCCTTTCATTTCAC | 86 | 683 |
| 1322564 | 8421 | 8440 | N/A | N/A | CCATCCTCAATTTTCTGTTT | 72 | 684 |
| 1322569 | 37367 | 37386 | 4639 | 4658 | AAGAACTATCAATATGCTAA | 77 | 685 |
| 1322695 | 29165 | 29184 | N/A | N/A | CCCAAGGAACTATCCAGCCC | 98 | 686 |
| 1322723 | 34309 | 34328 | N/A | N/A | GTTCAGAGAAATACTAATTT | 74 | 687 |
| 1322736 | 35343 | 35362 | 2615 | 2634 | TTTCCTAAATAAATTTCCTA | 96 | 688 |
| 1322765 | 34581 | 34600 | 1853 | 1872 | CCAGTGTAACTCCTGCTGAA | 86 | 689 |
| 1322931 | 20135 | 20154 | 484 | 503 | GAGTCAACCTCATACCATGA | 46 | 690 |
| 1322997 | 25728 | 25747 | N/A | N/A | GCAACCCTTATAATTTGTAT | 44 | 691 |
| 1323015 | 11424 | 11443 | N/A | N/A | TAGGATAATTACCTCTTCCA | 89 | 692 |
| 1323073 | 29930 | 29949 | N/A | N/A | TTAGTTGTTATGATTACCAC | 31 | 693 |
| 1323080 | 36023 | 36042 | 3295 | 3314 | ATGTAATTTCTTAAATTGGG | 30 | 694 |
| 1323105 | 31720 | 31739 | N/A | N/A | TCACTGATAAAATTTAGTCA | 71 | 695 |
| 1323155 | 27529 | 27548 | N/A | N/A | TGGTTTTTAAAGAAAAACCA | 69 | 696 |
| 1323159 | 30483 | 30502 | N/A | N/A | CAGTGGCTCACAAAACGATT | 52 | 697 |
| 1323202 | 4786 | 4805 | N/A | N/A | TTCAAGACACTCATGGTATC | 86 | 698 |
| 1323235 | 12386 | 12405 | N/A | N/A | GAGAGTTTTATACTTTTCCA | 83 | 699 |
| 1323241 | 28929 | 28948 | N/A | N/A | CTGAGTTAATCACATTTTTT | 29 | 700 |
| 1323254 | 38785 | 38804 | 6057 | 6076 | GATTTATTTATTATTTGTGT | 58 | 701 |
| 1323291 | 27043 | 27062 | N/A | N/A | TGGTTTCCTTATCTCTCTTT | 56 | 702 |
| 1323307 | 33769 | 33788 | N/A | N/A | TCTTATGGTTTAACTCCTTT | 48 | 703 |
| 1323320 | 22522 | 22541 | N/A | N/A | TCCTTTCCTATAACACAAAT | 98 | 704 |
| 1323343 | 5087 | 5106 | N/A | N/A | AGACTGAGCAACATTACAAT | 62 | 705 |
| | 7593 | 7612 | | | | | |
| 1323345 | 24586 | 24605 | N/A | N/A | TTAGAATCCATCTATTTTAC | 75 | 706 |

TABLE 10
Reduction of IFNAR1 RNA by 5-10-5 MOE gapmers with mixed PO/PS internucleoside linkages
in A431 cells

| | SEQ ID | SEQ ID | SEQ ID | SEQ ID | | | |
|---|---|---|---|---|---|---|---|
| | NO 1 | NO 1 | NO 2 | NO 2 | | IFNAR1 | |
| Compound | Start | Stop | Start | Stop | | (% | SEQ ID |
| Number | Site | Site | Site | Site | Sequence (5' to 3') | UTC) | NO |
| 1320892 | 11423 | 11442 | N/A | N/A | AGGATAATTACCTCTTCCAA | 84 | 707 |
| 1321013 | 27038 | 27057 | N/A | N/A | TCCTTATCTCTCTTTAGTGT | 38 | 708 |
| 1321049 | 20114 | 20133 | 463 | 482 | GAAGTGTTTTCTTTTTCTGC | 21 | 709 |
| 1321094 | 26824 | 26843 | N/A | N/A | TAGAAGGACATCCTCCCCAC | 92 | 710 |
| 1321115 | 31719 | 31738 | N/A | N/A | CACTGATAAAATTTAGTCAC | 84 | 711 |
| 1321282 | 27512 | 27531 | N/A | N/A | CCATTACTAAAAATTAAGTT | 101 | 712 |
| 1321288 | 19815 | 19834 | N/A | N/A | TGTCCTATTAACATTTTAGC | 56 | 713 |
| 1321299 | 30460 | 30479 | N/A | N/A | TAGTTTCTCACTCACAAGTC | 60 | 714 |
| 1321326 | 13590 | 13609 | N/A | N/A | TAGTGCCCTTTCATTTCACC | N.D. | 715 |
| 1321331 | 11900 | 11919 | N/A | N/A | TCTTACCTTTTCTCCTCTTT | 80 | 716 |
| 1321452 | 12385 | 12404 | N/A | N/A | AGAGTTTTATACTTTTCCAT | N.D. | 717 |
| 1321480 | 38783 | 38802 | 6055 | 6074 | TTTATTTATTATTTGTGTCC | 60 | 718 |
| 1321547 | 30037 | 30056 | N/A | N/A | GATGGCAACTACAATTTATT | 25 | 719 |
| 1321570 | 9564 | 9583 | N/A | N/A | GCTAACATCACTCTCCCAGA | 54 | 720 |
| 1321574 | 14834 | 14853 | N/A | N/A | TCATCCCCAATTTTTTGCTT | 87 | 721 |
| 1321596 | 29462 | 29481 | N/A | N/A | TTCCTAATCCTTCCCCCATC | 76 | 722 |
| 1321618 | 29569 | 29588 | N/A | N/A | GGTATATATTATCTTTGTCA | 1 | 723 |
| 1321635 | 33498 | 33517 | N/A | N/A | ATCCATAGAATATACTTTCT | 51 | 724 |
| 1321647 | 25299 | 25318 | N/A | N/A | CTTCTGACTTTTCCTTTCCT | 51 | 725 |
| 1321670 | 31280 | 31299 | N/A | N/A | ATAACCAAATCAGAAAGTTA | 87 | 726 |
| 1321767 | 37889 | 37908 | 5161 | 5180 | CTGCTGCAAATATCACGGCC | 109 | 727 |
| 1321771 | 8722 | 8741 | N/A | N/A | GGAACTCCTTAAATATCATA | 71 | 728 |
| 1321841 | 8226 | 8245 | N/A | N/A | TATTTACAATATCTTGTGCA | 47 | 729 |
| 1321859 | 25219 | 25238 | N/A | N/A | TCCATCTCTTTTCTCCCCAT | 37 | 730 |
| 1321860 | 28928 | 28947 | N/A | N/A | TGAGTTAATCACATTTTTTT | N.D. | 731 |
| 1321904 | 22803 | 22822 | N/A | N/A | AGTAACATTTATTTTGCTTA | 40 | 732 |
| 1321952 | 6170 | 6189 | N/A | N/A | GCAAGTTTTTCATAAACAAA | 43 | 733 |
| 1322048 | 25424 | 25443 | N/A | N/A | GCACATAAATGCATTTGCAT | 53 | 734 |
| 1322086 | 20496 | 20515 | N/A | N/A | TATCACCACATCACACATCA | 75 | 735 |
| 1322104 | 7640 | 7659 | N/A | N/A | AGAATTGCATTTACTAGGCT | 79 | 736 |
| 1322106 | 36022 | 36041 | 3294 | 3313 | TGTAATTTCTTAAATTGGGT | 24 | 737 |
| 1322139 | 28092 | 28111 | 937 | 956 | GGATTCCTTTTTAAAAAGGC | 78† | 738 |
| 1322176 | 24313 | 24332 | 888 | 907 | TTGCATATGTATAATCCCAT | 7 | 132 |
| 1322227 | 19238 | 19257 | N/A | N/A | TTCAAGGTTTCCTCTGCCCT | 67 | 739 |
| 1322261 | 13337 | 13356 | N/A | N/A | ACAAGTCACTTCTCTGTCTT | 93 | 740 |
| 1322291 | 16354 | 16373 | N/A | N/A | TTCTATATTCCTCCTTCTGC | 82 | 741 |
| 1322310 | 6921 | 6940 | N/A | N/A | TTCCATTGATTTCAACCAAT | 51 | 742 |
| 1322328 | 18345 | 18364 | N/A | N/A | GAAATACTTCATTCTTGGCC | 50 | 743 |
| 1322407 | 9204 | 9223 | N/A | N/A | GCAATGACCAATCAAGAGCA | 71 | 744 |
| 1322488 | 25168 | 25187 | N/A | N/A | TTCTCTTTTCTCTATTCATC | 55 | 745 |
| 1322519 | 8409 | 8428 | N/A | N/A | TTCTGTTTCATACTTGGAGT | 72 | 746 |
| 1322521 | 29164 | 29183 | N/A | N/A | CCAAGGAACTATCCAGCCCA | 85 | 747 |
| 1322578 | 35337 | 35356 | 2609 | 2628 | AAATAAATTTCCTAAGGGCC | 81 | 748 |
| 1322599 | 10420 | 10439 | N/A | N/A | TAGGATACTACATCAGCTCA | 65 | 749 |
| 1322608 | 16983 | 17002 | N/A | N/A | ATAGTTTCTTTATACAAGTA | 65 | 750 |
| 1322652 | 38318 | 38337 | 5590 | 5609 | ACAAATTCACTAAGTACAAA | 88 | 751 |
| 1322664 | 35769 | 35788 | 3041 | 3060 | AGGGAAGCATTCTTCTTCTA | 83 | 752 |
| 1322666 | 34298 | 34317 | N/A | N/A | TACTAATTTAAAAAAAGGGA | 102 | 753 |
| 1322670 | 25606 | 25625 | N/A | N/A | TGCTTTGTACAATATGGTAA | 27 | 754 |
| 1322679 | 32874 | 32893 | N/A | N/A | TCTCTATTATTTTCTGGATA | 54 | 755 |
| 1322693 | 34568 | 34587 | 1840 | 1859 | TGCTGAAAAACCTTATACTT | 91 | 756 |
| 1322711 | 24201 | 24220 | N/A | N/A | AAAGCACACATTTTTACTCA | 89 | 757 |
| 1322732 | 13954 | 13973 | N/A | N/A | TGGGTAGTAACAACAGCAGC | 72 | 758 |
| 1322800 | 29927 | 29946 | N/A | N/A | GTTGTTATGATTACCACCAC | 19 | 759 |
| 1322801 | 5086 | 5105 | N/A | N/A | GACTGAGCAACATTACAATC | 55 | 760 |
| | 7592 | 7611 | | | | | |
| 1322817 | 35621 | 35640 | 2893 | 2912 | TAGATAGTTACCTATTTTCT | 67 | 761 |
| 1322825 | 4773 | 4792 | N/A | N/A | TGGTATCTTAAAATACAGAT | 77 | 762 |
| 1322897 | 37020 | 37039 | 4292 | 4311 | TCTCCACATCCTACAAGGGC | 70 | 763 |
| 1322904 | 24831 | 24850 | N/A | N/A | TTTCTTTCCCACCGAAGTAT | 47 | 764 |
| 1322938 | 31064 | 31083 | N/A | N/A | TAATTTCTCTCTACCTGATT | 141 | 765 |
| 1322967 | 28358 | 28377 | N/A | N/A | TTGTAAAGAAATAATGTTCA | 88 | 766 |
| 1322969 | 18138 | 18157 | N/A | N/A | CATCTGTCTTTCCTACTTCA | 69 | 767 |
| 1322975 | 26952 | 26971 | N/A | N/A | TAACTATCACCCCAACACAA | 86 | 768 |
| 1322977 | 30188 | 30207 | N/A | N/A | GCAATGTAACCAATCACATA | 52 | 769 |
| 1322990 | 21083 | 21102 | N/A | N/A | CGAGAATCCCAAACAGCCAT | 73 | 770 |
| 1323018 | 25095 | 25114 | N/A | N/A | TTTAAAAATTTTAATGCTTA | 100 | 771 |
| 1323037 | 25802 | 25821 | N/A | N/A | TTCATACCTTATCTCTTTCC | 49 | 772 |
| 1323043 | 25715 | 25734 | N/A | N/A | TTTGTATACCACTCTTTAGT | 49 | 773 |
| 1323111 | 22521 | 22540 | N/A | N/A | CCTTTCCTATAACACAAATA | 83 | 774 |
| 1323144 | 27275 | 27294 | N/A | N/A | ATATCATAAAAATCAGCAAA | 89 | 775 |
| 1323186 | 24585 | 24604 | N/A | N/A | TAGAATCCATCTATTTTACA | 70 | 776 |
| 1323269 | 28580 | 28599 | N/A | N/A | ACCCAAATCATAATTATAAC | 79 | 777 |
| 1323278 | 37356 | 37375 | 4628 | 4647 | ATATGCTAATTTTCAGGCGG | 40 | 778 |
| 1323279 | 26087 | 26106 | N/A | N/A | CCTGATGGCCTCTAAGAAGT | 95 | 779 |
| 1323300 | 5761 | 5780 | N/A | N/A | GGACCTCTCCCAACTTTCTT | 94 | 780 |
| 1323305 | 33765 | 33784 | N/A | N/A | ATGGTTTAACTCCTTTGCTC | 51 | 781 |
| 1323319 | 31883 | 31902 | 1416 | 1435 | TTGTTTTCTCACATACAGCG | 54 | 782 |
| 1323347 | 22299 | 22318 | 555 | 574 | CTATTGCCTTATCTTCAGCT | 26 | 783 |

TABLE 11
Reduction of IFNAR1 RNA by 5-10-5 MOE gapmers with mixed PO/PS internucleoside linkages
in A431 cells

| | SEQ ID | SEQ ID | SEQ ID | SEQ ID | | | |
|---|---|---|---|---|---|---|---|
| | NO 1 | NO 1 | NO 2 | NO 2 | | IFNAR1 | |
| Compound | Start | Stop | Start | Stop | | (% | SEQ ID |
| Number | Site | Site | Site | Site | Sequence (5' to 3') | UTC) | NO |
| 1320906 | 25591 | 25610 | N/A | N/A | GGTAAGTACCCAAAAGAAGC | 48 | 784 |
| 1320951 | 11899 | 11918 | N/A | N/A | CTTACCTTTTCTCCTCTTTC | 40 | 785 |
| 1320953 | 10274 | 10293 | N/A | N/A | CCGTATACCACTTCAGCTTA | 57 | 786 |
| 1321011 | 28090 | 28109 | N/A | N/A | ATTCCTTTTTAAAAAGGCGC | 78† | 787 |
| 1321032 | 8211 | 8230 | N/A | N/A | GTGCAGAATATTATAATTCT | 26 | 788 |
| 1321040 | 24580 | 24599 | N/A | N/A | TCCATCTATTTTACAAGTGA | 18 | 789 |
| 1321062 | 25714 | 25733 | N/A | N/A | TTGTATACCACTCTTTAGTC | 47 | 790 |
| 1321104 | 31865 | 31884 | 1398 | 1417 | CGTCACTAAAAACACTGCTT | 37 | 791 |
| 1321118 | 16353 | 16372 | N/A | N/A | TCTATATTCCTCCTTCTGCC | N.D. | 792 |
| 1321171 | 34567 | 34586 | 1839 | 1858 | GCTGAAAAACCTTATACTTG | 30 | 793 |
| 1321205 | 25165 | 25184 | N/A | N/A | TCTTTTCTCTATTCATCTCC | 75 | 794 |
| 1321312 | 22496 | 22515 | N/A | N/A | TGGTTCTTTAAAAAAGTATA | 71 | 795 |
| 1321357 | 25413 | 25432 | N/A | N/A | CATTTGCATTCTACCAGTCA | 47 | 796 |
| 1321358 | 12381 | 12400 | N/A | N/A | TTTTATACTTTTCCATGTTT | 80 | 797 |
| 1321397 | 27037 | 27056 | N/A | N/A | CCTTATCTCTCTTTAGTGTC | 49 | 798 |
| 1321440 | 29926 | 29945 | N/A | N/A | TTGTTATGATTACCACCACT | 28 | 799 |
| 1321490 | 33764 | 33783 | N/A | N/A | TGGTTTAACTCCTTTGCTCC | 59 | 800 |
| 1321503 | 9164 | 9183 | N/A | N/A | GGTGTGTTTCTTTTTGCCCA | 63 | 801 |
| 1321521 | 33497 | 33516 | N/A | N/A | TCCATAGAATATACTTTCTA | 67 | 802 |
| 1321542 | 8721 | 8740 | N/A | N/A | GAACTCCTTAAATATCATAA | 87 | 803 |
| 1321605 | 25218 | 25237 | N/A | N/A | CCATCTCTTTTCTCCCCATA | 46 | 804 |
| 1321643 | 18093 | 18112 | N/A | N/A | AAACTGTTTTACATCTAATC | 75 | 805 |
| 1321644 | 13220 | 13239 | N/A | N/A | AGTCCCCAACTACTATCATA | 88 | 806 |
| 1321646 | 27274 | 27293 | N/A | N/A | TATCATAAAAATCAGCAAAC | 83 | 807 |
| 1321723 | 28329 | 28348 | N/A | N/A | ACAATTTTAAAAACTTGCAC | 139 | 808 |
| 1321769 | 16980 | 16999 | N/A | N/A | GTTTCTTTATACAAGTAACA | 70 | 809 |
| 1321797 | 30458 | 30477 | N/A | N/A | GTTTCTCACTCACAAGTCTA | 42 | 810 |
| 1321817 | 20112 | 20131 | 461 | 480 | AGTGTTTTCTTTTTCTGCTC | 21 | 811 |
| 1321827 | 4772 | 4791 | N/A | N/A | GGTATCTTAAAATACAGATT | 71 | 812 |
| 1321855 | 31710 | 31729 | N/A | N/A | AATTTAGTCACCTCAAGAAA | 79 | 813 |
| 1321936 | 24200 | 24219 | N/A | N/A | AAGCACACATTTTTACTCAA | 78 | 814 |
| 1321937 | 8398 | 8417 | N/A | N/A | ACTTGGAGTCTCTAAAACTT | 65 | 815 |
| 1321981 | 32825 | 32844 | N/A | N/A | ATCAAACACATTTTCTGTTC | 63 | 816 |
| 1321990 | 11422 | 11441 | N/A | N/A | GGATAATTACCTCTTCCAAA | 82 | 817 |
| 1322164 | 30035 | 30054 | N/A | N/A | TGGCAACTACAATTTATTGA | 10 | 818 |
| 1322176 | 24313 | 24332 | 888 | 907 | TTGCATATGTATAATCCCAT | 16 | 312 |
| 1322206 | 6145 | 6164 | N/A | N/A | TCAAAGAAATTACTATGGGA | 75 | 819 |
| 1322258 | 27511 | 27530 | N/A | N/A | CATTACTAAAAATTAAGTTA | 100 | 820 |
| 1322276 | 25026 | 25045 | N/A | N/A | GCAGGTGTGATCATACAACA | 33 | 821 |
| 1322280 | 22773 | 22792 | N/A | N/A | ACAATGTTTTTAACATATAT | 99 | 822 |
| 1322281 | 26071 | 26090 | N/A | N/A | AAGTGAGCCACCATGAGCTC | 100 | 823 |
| 1322296 | 37353 | 37372 | 4625 | 4644 | TGCTAATTTTCAGGCGGTTA | 30 | 824 |
| 1322362 | 36021 | 36040 | 3293 | 3312 | GTAATTTCTTAAATTGGGTT | 20 | 825 |
| 1322372 | 20495 | 20514 | N/A | N/A | ATCACCACATCACACATCAA | 60 | 826 |
| 1322398 | 19237 | 19256 | N/A | N/A | TCAAGGTTTCCTCTGCCCTC | 63 | 827 |
| 1322444 | 19814 | 19833 | N/A | N/A | GTCCTATTAACATTTTAGCA | 52 | 828 |
| 1322456 | 29519 | 29538 | N/A | N/A | TGTTTGTCAACCCTTTTTTC | 38 | 829 |
| 1322469 | 5085 | 5104 | N/A | N/A | ACTGAGCAACATTACAATCT | 46 | 830 |
| | 7591 | 7610 | | | | | |
| 1322509 | 38747 | 38766 | 6019 | 6038 | AGGGAAGCTTAAAAACACAA | 86 | 831 |
| 1322514 | 35620 | 35639 | 2892 | 2911 | AGATAGTTACCTATTTTCTA | 56 | 832 |
| 1322548 | 26950 | 26969 | N/A | N/A | ACTATCACCCCAACACAAAA | 74 | 833 |
| 1322575 | 18344 | 18363 | N/A | N/A | AAATACTTCATTCTTGGCCA | 77 | 834 |
| 1322580 | 29461 | 29480 | N/A | N/A | TCCTAATCCTTCCCCCATCA | 74 | 835 |
| 1322586 | 25298 | 25317 | N/A | N/A | TTCTGACTTTTCCTTTCCTG | 47 | 836 |
| 1322592 | 37888 | 37907 | 5160 | 5179 | TGCTGCAAATATCACGGCCT | 87 | 837 |
| 1322610 | 13924 | 13943 | N/A | N/A | GATGTGGTACCCCCTGCCCC | N.D. | 838 |
| 1322614 | 37019 | 37038 | 4291 | 4310 | CTCCACATCCTACAAGGGCA | 67 | 839 |
| 1322621 | 26820 | 26839 | N/A | N/A | AGGACATCCTCCCCACTGGA | N.D. | 840 |
| 1322730 | 28927 | 28946 | N/A | N/A | GAGTTAATCACATTTTTTTT | 33 | 841 |
| 1322758 | 25801 | 25820 | N/A | N/A | TCATACCTTATCTCTTTCCT | 45 | 842 |
| 1322779 | 9563 | 9582 | N/A | N/A | CTAACATCACTCTCCCAGAC | 56 | 843 |
| 1322805 | 21070 | 21089 | N/A | N/A | CAGCCATTATTTATGTGGGC | 96 | 844 |
| 1322816 | 6919 | 6938 | N/A | N/A | CCATTGATTTCAACCAATTA | 35 | 845 |
| 1322824 | 14721 | 14740 | N/A | N/A | CCAAACACTTTCCAAATCTA | 61 | 846 |
| 1322866 | 35765 | 35784 | 3037 | 3056 | AAGCATTCTTCTTCTATGTC | 48 | 847 |
| 1322879 | 7639 | 7658 | N/A | N/A | GAATTGCATTTACTAGGCTA | 77 | 848 |
| 1322903 | 29134 | 29153 | N/A | N/A | GTGCTGAGAATCCCAGGTTT | 35 | 849 |
| 1322905 | 22294 | 22313 | 550 | 569 | GCCTTATCTTCAGCTTCTAA | 20 | 850 |
| 1322964 | 28579 | 28598 | N/A | N/A | CCCAAATCATAATTATAACT | 81 | 851 |
| 1322985 | 34278 | 34297 | N/A | N/A | AAGAGTAGAAATCAATTATT | 131 | 852 |
| 1322991 | 31060 | 31079 | N/A | N/A | TTCTCTCTACCTGATTCCCT | 48 | 853 |
| 1323020 | 30187 | 30206 | N/A | N/A | CAATGTAACCAATCACATAA | 74 | 854 |
| 1323048 | 5757 | 5776 | N/A | N/A | CTCTCCCAACTTTCTTACGC | 96 | 855 |
| 1323102 | 13589 | 13608 | N/A | N/A | AGTGCCCTTTCATTTCACCT | 90 | 856 |
| 1323211 | 24824 | 24843 | N/A | N/A | CCCACCGAAGTATCTACTAC | 81 | 857 |
| 1323272 | 38295 | 38314 | 5567 | 5586 | ACTCCTAGACTTTTGGGCCC | 94 | 858 |
| 1323290 | 35336 | 35355 | 2608 | 2627 | AATAAATTTCCTAAGGGCCT | 77 | 859 |
| 1323296 | 31270 | 31289 | N/A | N/A | CAGAAAGTTAAAAATGCTGC | 55 | 860 |

TABLE 12
Reduction of IFNAR1 RNA by 5-10-5 MOE gapmers with mixed PO/PS internucleoside linkages
in A431 cells

| | SEQ ID | SEQ ID | SEQ ID | SEQ ID | | | |
|---|---|---|---|---|---|---|---|
| | NO 1 | NO 1 | NO 2 | NO 2 | | IFNAR1 | |
| Compound | Start | Stop | Start | Stop | | (% | SEQ ID |
| Number | Site | Site | Site | Site | Sequence (5' to 3') | UTC) | NO |
| 1320935 | 25022 | 25041 | N/A | N/A | GTGTGATCATACAACACTGC | 65 | 861 |
| 1320997 | 16968 | 16987 | N/A | N/A | AAGTAACATTAAATAAGGGT | 22 | 862 |
| 1321034 | 29117 | 29136 | N/A | N/A | TTTAGATGAATACATGGGAA | 25 | 863 |
| 1321057 | 22495 | 22514 | N/A | N/A | GGTTCTTTAAAAAAGTATAA | 91 | 864 |
| 1321096 | 13217 | 13236 | N/A | N/A | CCCCAACTACTATCATATTG | 79 | 865 |
| 1321131 | 34223 | 34242 | N/A | N/A | CTTTAGTTTCTTACATCCAT | 45 | 866 |
| 1321139 | 36007 | 36026 | 3279 | 3298 | TGGGTTTTTCTTCCTAGTTA | 23 | 867 |
| 1321140 | 22288 | 22307 | 544 | 563 | TCTTCAGCTTCTAAATGTAC | 64 | 868 |
| 1321141 | 19216 | 19235 | N/A | N/A | CCAAAAGCAAACCATCCCTT | 102 | 869 |
| 1321146 | 31864 | 31883 | 1397 | 1416 | GTCACTAAAAACACTGCTTT | 43 | 870 |
| 1321155 | 7619 | 7638 | N/A | N/A | AAAGGTACATTTATACAACT | 43 | 871 |
| 1321162 | 6916 | 6935 | N/A | N/A | TTGATTTCAACCAATTACCA | 70 | 872 |
| 1321175 | 35619 | 35638 | 2891 | 2910 | GATAGTTACCTATTTTCTAT | 37 | 873 |
| 1321210 | 26947 | 26966 | N/A | N/A | ATCACCCCAACACAAAATCC | 98 | 874 |
| 1321249 | 29924 | 29943 | N/A | N/A | GTTATGATTACCACCACTTC | 12 | 875 |
| 1321284 | 4771 | 4790 | N/A | N/A | GTATCTTAAAATACAGATTT | 74 | 876 |
| 1321292 | 11897 | 11916 | N/A | N/A | TACCTTTTCTCCTCTTTCTG | 71 | 877 |
| 1321419 | 21053 | 21072 | N/A | N/A | GGCTGTATATTTTTATATTA | 123 | 878 |
| 1321481 | 9156 | 9175 | N/A | N/A | TCTTTTTGCCCACCTGATTC | 70 | 879 |
| 1321622 | 29518 | 29537 | N/A | N/A | GTTTGTCAACCCTTTTTTCA | 26 | 880 |
| 1321838 | 38279 | 38298 | 5551 | 5570 | GCCCATTGCTTATTACATAA | 61 | 881 |
| 1321857 | 13921 | 13940 | N/A | N/A | GTGGTACCCCCTGCCCCATC | 94 | 882 |
| 1321864 | 33496 | 33515 | N/A | N/A | CCATAGAATATACTTTCTAC | 46 | 883 |
| 1321917 | 28815 | 28834 | N/A | N/A | GTGACCCTCCCACCCCAAGT | 76 | 884 |
| 1321994 | 11421 | 11440 | N/A | N/A | GATAATTACCTCTTCCAAAC | 87 | 885 |
| 1322007 | 5755 | 5774 | N/A | N/A | CTCCCAACTTTCTTACGCAA | 60 | 886 |
| 1322009 | 27500 | 27519 | N/A | N/A | ATTAAGTTATATAAATTTGC | 93 | 887 |
| 1322033 | 29458 | 29477 | N/A | N/A | TAATCCTTCCCCCATCATAA | 76 | 888 |
| 1322044 | 25590 | 25609 | N/A | N/A | GTAAGTACCCAAAAGAAGCT | 54 | 889 |
| 1322046 | 28577 | 28596 | N/A | N/A | CAAATCATAATTATAACTCT | 85 | 890 |
| 1322047 | 25164 | 25183 | N/A | N/A | CTTTTCTCTATTCATCTCCT | 50 | 891 |
| 1322066 | 31256 | 31275 | N/A | N/A | TGCTGCTGCCAAAAAAGCAT | 95 | 892 |
| 1322068 | 24198 | 24217 | N/A | N/A | GCACACATTTTTACTCAAGT | 42 | 893 |
| 1322074 | 8394 | 8413 | N/A | N/A | GGAGTCTCTAAAACTTCATC | 101 | 894 |
| 1322080 | 25799 | 25818 | N/A | N/A | ATACCTTATCTCTTTCCTTA | 61 | 895 |
| 1322087 | 16352 | 16371 | N/A | N/A | CTATATTCCTCCTTCTGCCT | 65 | 896 |
| 1322095 | 28312 | 28331 | N/A | N/A | CACCAGAGAATTACAATCTC | 80 | 897 |
| 1322135 | 31054 | 31073 | N/A | N/A | CTACCTGATTCCCTGATCTA | 70 | 898 |
| 1322136 | 30185 | 30204 | N/A | N/A | ATGTAACCAATCACATAATC | 57 | 899 |
| 1322170 | 25713 | 25732 | N/A | N/A | TGTATACCACTCTTTAGTCC | 11 | 900 |
| 1322175 | 33762 | 33781 | N/A | N/A | GTTTAACTCCTTTGCTCCTA | 39 | 901 |
| 1322176 | 24313 | 24332 | 888 | 907 | TTGCATATGTATAATCCCAT | 7 | 132 |
| 1322207 | 26056 | 26075 | N/A | N/A | AGCTCTAGAAATAAATTCTG | 81 | 902 |
| 1322216 | 24579 | 24598 | N/A | N/A | CCATCTATTTTACAAGTGAA | 11 | 903 |
| 1322314 | 35289 | 35308 | 2561 | 2580 | ATGTTTGAAATATCTCCCGA | 50 | 904 |
| 1322352 | 18330 | 18349 | N/A | N/A | TGGCCAGTTTTCACTTCCAC | 64 | 905 |
| 1322375 | 22768 | 22787 | N/A | N/A | GTTTTTAACATATATTGACC | 45 | 906 |
| 1322401 | 20493 | 20512 | N/A | N/A | CACCACATCACACATCAAAC | 101 | 907 |
| 1322403 | 37018 | 37037 | 4290 | 4309 | TCCACATCCTACAAGGGCAT | 40 | 908 |
| 1322406 | 18092 | 18111 | N/A | N/A | AACTGTTTTACATCTAATCA | 63 | 909 |
| 1322418 | 25297 | 25316 | N/A | N/A | TCTGACTTTTCCTTTCCTGT | 24 | 910 |
| 1322467 | 25217 | 25236 | N/A | N/A | CATCTCTTTTCTCCCCATAA | 31 | 911 |
| 1322482 | 9561 | 9580 | N/A | N/A | AACATCACTCTCCCAGACTA | 71 | 912 |
| 1322513 | 24821 | 24840 | N/A | N/A | ACCGAAGTATCTACTACAAA | 28 | 913 |
| 1322515 | 27027 | 27046 | N/A | N/A | CTTTAGTGTCTCCTTAGTCC | 25 | 914 |
| 1322520 | 14644 | 14663 | N/A | N/A | AAGTAGAGTCACATACTTTT | 88 | 915 |
| 1322531 | 31708 | 31727 | N/A | N/A | TTTAGTCACCTCAAGAAATC | 105 | 916 |
| 1322550 | 12377 | 12396 | N/A | N/A | ATACTTTTCCATGTTTTCAA | 65 | 917 |
| 1322551 | 26818 | 26837 | N/A | N/A | GACATCCTCCCCACTGGAGA | 87 | 918 |
| 1322587 | 27260 | 27279 | N/A | N/A | GCAAACACTACAAAATAGGA | 29 | 919 |
| 1322727 | 19813 | 19832 | N/A | N/A | TCCTATTAACATTTTAGCAT | 35 | 920 |
| 1322868 | 30033 | 30052 | N/A | N/A | GCAACTACAATTTATTGAAT | 32 | 921 |
| 1322922 | 35764 | 35783 | 3036 | 3055 | AGCATTCTTCTTCTATGTCA | 26 | 922 |
| 1322952 | 25409 | 25428 | N/A | N/A | TGCATTCTACCAGTCACCCT | 30 | 923 |
| 1322959 | 10270 | 10289 | N/A | N/A | ATACCACTTCAGCTTAGGCA | 38 | 924 |
| 1322980 | 34566 | 34585 | 1838 | 1857 | CTGAAAAACCTTATACTTGA | 36 | 925 |
| 1322994 | 30448 | 30467 | N/A | N/A | CACAAGTCTACAGACTGGCT | 63 | 926 |
| 1323027 | 37680 | 37699 | 4952 | 4971 | AAGTAACTTTTTTATAAGTT | 105 | 927 |
| 1323038 | 38745 | 38764 | 6017 | 6036 | GGAAGCTTAAAAACACAAGT | 69 | 928 |
| 1323045 | 8210 | 8229 | N/A | N/A | TGCAGAATATTATAATTCTA | 53 | 929 |
| 1323088 | 13587 | 13606 | N/A | N/A | TGCCCTTTCATTTCACCTTT | 84 | 930 |
| 1323096 | 28045 | 28064 | N/A | N/A | CATTAGATATTTATTAAGTA | 104 | 931 |
| 1323128 | 32814 | 32833 | N/A | N/A | TTTCTGTTCATTACCTAGCT | 42 | 932 |
| 1323169 | 20111 | 20130 | 460 | 479 | GTGTTTTCTTTTTCTGCTCT | 9 | 933 |
| 1323207 | 6113 | 6132 | N/A | N/A | CTAGTACCCACATCCTAGGA | 86 | 934 |
| 1323239 | 5084 | 5103 | N/A | N/A | CTGAGCAACATTACAATCTC | 35 | 935 |
| | 7590 | 7609 | | | | | |
| 1323326 | 37318 | 37337 | 4590 | 4609 | TGCATGGTATTTCTAAGTAA | 26 | 936 |
| 1323342 | 8717 | 8736 | N/A | N/A | TCCTTAAATATCATAAAGGA | 86 | 937 |

TABLE 13
Reduction of IFNAR1 RNA by 5-10-5 MOE gapmers with mixed PO/PS internucleoside linkages
in A431 cells

| | SEQ ID | SEQ ID | SEQ ID | SEQ ID | | | |
|---|---|---|---|---|---|---|---|
| | NO 1 | NO 1 | NO 2 | NO 2 | | IFNAR1 | |
| Compound | Start | Stop | Start | Stop | | (% | SEQ ID |
| Number | Site | Site | Site | Site | Sequence (5' to 3') | UTC) | NO |
| 1320907 | 29116 | 29135 | N/A | N/A | TTAGATGAATACATGGGAAT | 71 | 938 |
| 1320931 | 26817 | 26836 | N/A | N/A | ACATCCTCCCCACTGGAGAA | 86 | 939 |
| 1320992 | 25408 | 25427 | N/A | N/A | GCATTCTACCAGTCACCCTT | 41 | 940 |
| 1321012 | 31255 | 31274 | N/A | N/A | GCTGCTGCCAAAAAAGCATA | 98 | 941 |
| 1321033 | 38743 | 38762 | 6015 | 6034 | AAGCTTAAAAACACAAGTGT | 90 | 942 |
| 1321039 | 8716 | 8735 | N/A | N/A | CCTTAAATATCATAAAGGAC | 106 | 943 |
| 1321053 | 11417 | 11436 | N/A | N/A | ATTACCTCTTCCAAACTTTA | 90 | 944 |
| 1321137 | 11896 | 11915 | N/A | N/A | ACCTTTTCTCCTCTTTCTGT | 96 | 945 |
| 1321176 | 26944 | 26963 | N/A | N/A | ACCCCAACACAAAATCCCCA | 84 | 946 |
| 1321267 | 25021 | 25040 | N/A | N/A | TGTGATCATACAACACTGCA | 108 | 947 |
| 1321286 | 21051 | 21070 | N/A | N/A | CTGTATATTTTTATATTAGC | 81 | 948 |
| 1321333 | 35615 | 35634 | 2887 | 2906 | GTTACCTATTTTCTATGACT | 57 | 949 |
| 1321337 | 28042 | 28061 | N/A | N/A | TAGATATTTATTAAGTATTT | 113 | 950 |
| 1321345 | 35267 | 35286 | 2539 | 2558 | AAGAATGAAACAGAATGTTA | 111 | 951 |
| 1321346 | 27026 | 27045 | N/A | N/A | TTTAGTGTCTCCTTAGTCCA | 62 | 952 |
| 1321399 | 16951 | 16970 | N/A | N/A | GGTATCTGAAATAATTCCTT | 84 | 953 |
| 1321425 | 30184 | 30203 | N/A | N/A | TGTAACCAATCACATAATCC | 98 | 954 |
| 1321437 | 34214 | 34233 | N/A | N/A | CTTACATCCATTACTGAGAA | 71 | 955 |
| 1321454 | 5083 | 5102 | N/A | N/A | TGAGCAACATTACAATCTCA | 74 | 956 |
| | 7589 | 7608 | | | | | |
| 1321460 | 5709 | 5728 | N/A | N/A | CAAGTGACTGCAACACCCTC | 108 | 957 |
| 1321491 | 12355 | 12374 | N/A | N/A | TACTGACTGCTCTCTTTTCA | 99 | 958 |
| 1321529 | 37002 | 37021 | 4274 | 4293 | GCATTGCTCCTTTTTAGGCT | 38 | 959 |
| 1321538 | 18091 | 18110 | N/A | N/A | ACTGTTTTACATCTAATCAA | 64 | 960 |
| 1321540 | 24818 | 24837 | N/A | N/A | GAAGTATCTACTACAAAATT | 79 | 961 |
| 1321573 | 25296 | 25315 | N/A | N/A | CTGACTTTTCCTTTCCTGTC | 52 | 962 |
| 1321629 | 6112 | 6131 | N/A | N/A | TAGTACCCACATCCTAGGAA | 91 | 963 |
| 1321652 | 30428 | 30447 | N/A | N/A | GGGCAGCTCCCACGGAGGCT | 96 | 964 |
| 1321690 | 29456 | 29475 | N/A | N/A | ATCCTTCCCCCATCATAAAA | 116 | 965 |
| 1321774 | 31707 | 31726 | N/A | N/A | TTAGTCACCTCAAGAAATCA | 105 | 966 |
| 1321815 | 31855 | 31874 | 1388 | 1407 | AACACTGCTTTTATTCAGCT | 55 | 967 |
| 1321824 | 19806 | 19825 | N/A | N/A | AACATTTTAGCATACACCCT | 99 | 968 |
| 1321835 | 20492 | 20511 | N/A | N/A | ACCACATCACACATCAAACA | 115 | 969 |
| 1321849 | 35998 | 36017 | 3270 | 3289 | CTTCCTAGTTACATTTTTCC | 79 | 970 |
| 1321868 | 9560 | 9579 | N/A | N/A | ACATCACTCTCCCAGACTAC | 107 | 971 |
| 1321992 | 29923 | 29942 | N/A | N/A | TTATGATTACCACCACTTCA | 65 | 972 |
| 1322031 | 13913 | 13932 | N/A | N/A | CCCTGCCCCATCTCCCACTG | 88 | 973 |
| 1322070 | 22748 | 22767 | N/A | N/A | TATCATGTAAACTTCAGCAA | 87 | 974 |
| 1322127 | 13586 | 13605 | N/A | N/A | GCCCTTTCATTTCACCTTTC | 106 | 975 |
| 1322176 | 24313 | 24332 | 888 | 907 | TTGCATATGTATAATCCCAT | 17 | 132 |
| 1322192 | 34564 | 34583 | 1836 | 1855 | GAAAAACCTTATACTTGACA | 70 | 976 |
| 1322226 | 25568 | 25587 | N/A | N/A | GAGATCAGCTATCAGAAATA | 68 | 977 |
| 1322356 | 6838 | 6857 | N/A | N/A | TTTCCAGATCGAACCAATCA | 89 | 978 |
| 1322368 | 27499 | 27518 | N/A | N/A | TTAAGTTATATAAATTTGCA | 111 | 979 |
| 1322377 | 24197 | 24216 | N/A | N/A | CACACATTTTTACTCAAGTG | 97 | 980 |
| 1322379 | 4744 | 4763 | N/A | N/A | ACTAACTAAATTCTCACAGA | 100 | 981 |
| 1322399 | 33493 | 33512 | N/A | N/A | TAGAATATACTTTCTACGCT | 90 | 982 |
| 1322422 | 22479 | 22498 | N/A | N/A | ATAAAGTCAAATTTTAGGAT | 101 | 983 |
| 1322438 | 16350 | 16369 | N/A | N/A | ATATTCCTCCTTCTGCCTGC | 77 | 984 |
| 1322465 | 30032 | 30051 | N/A | N/A | CAACTACAATTTATTGAATC | 81 | 985 |
| 1322499 | 33756 | 33775 | N/A | N/A | CTCCTTTGCTCCTAACACCT | 92 | 986 |
| 1322518 | 24529 | 24548 | N/A | N/A | AGCTCAATGTCATCCAGTTA | 42 | 987 |
| 1322563 | 19212 | 19231 | N/A | N/A | AAGCAAACCATCCCTTCTGC | 111 | 988 |
| 1322624 | 25163 | 25182 | N/A | N/A | TTTTCTCTATTCATCTCCTA | 86 | 989 |
| 1322637 | 22249 | 22268 | N/A | N/A | GCTGCAAAAAAATCAAAACA | 113 | 990 |
| 1322642 | 25215 | 25234 | N/A | N/A | TCTCTTTTCTCCCCATAACC | 105 | 991 |
| 1322691 | 9038 | 9057 | N/A | N/A | ATAGACCAAAATTAACTGCA | 55 | 992 |
| 1322731 | 8393 | 8412 | N/A | N/A | GAGTCTCTAAAACTTCATCC | 115 | 993 |
| 1322757 | 37676 | 37695 | 4948 | 4967 | AACTTTTTTATAAGTTGCAA | 96 | 994 |
| 1322769 | 31052 | 31071 | N/A | N/A | ACCTGATTCCCTGATCTATA | 70 | 995 |
| 1322809 | 28814 | 28833 | N/A | N/A | TGACCCTCCCACCCCAAGTA | 111 | 996 |
| 1322818 | 14642 | 14661 | N/A | N/A | GTAGAGTCACATACTTTTGA | 94 | 997 |
| 1322833 | 37308 | 37327 | 4580 | 4599 | TTCTAAGTAAACTTCTGTTC | 80 | 998 |
| 1322849 | 28576 | 28595 | N/A | N/A | AAATCATAATTATAACTCTA | 80 | 999 |
| 1322929 | 10150 | 10169 | N/A | N/A | GAGTAGTTCCACCTCTGCTT | 129 | 1000 |
| 1322966 | 26055 | 26074 | N/A | N/A | GCTCTAGAAATAAATTCTGC | 90 | 1001 |
| 1323028 | 28311 | 28330 | N/A | N/A | ACCAGAGAATTACAATCTCC | 100 | 1002 |
| 1323031 | 27259 | 27278 | N/A | N/A | CAAACACTACAAAATAGGAC | 96 | 1003 |
| 1323059 | 20109 | 20128 | 458 | 477 | GTTTTCTTTTTCTGCTCTTA | 5 | 1004 |
| 1323118 | 29517 | 29536 | N/A | N/A | TTTGTCAACCCTTTTTTCAT | 93 | 1005 |
| 1323130 | 38277 | 38296 | 5549 | 5568 | CCATTGCTTATTACATAAAA | 103 | 1006 |
| 1323152 | 7618 | 7637 | N/A | N/A | AAGGTACATTTATACAACTT | 38 | 1007 |
| 1323165 | 25795 | 25814 | N/A | N/A | CTTATCTCTTTCCTTATGGC | 56 | 1008 |
| 1323178 | 35753 | 35772 | 3025 | 3044 | TCTATGTCAGTCTCCTATCA | 53 | 1009 |
| 1323198 | 18329 | 18348 | N/A | N/A | GGCCAGTTTTCACTTCCACT | 50 | 1010 |
| 1323205 | 13215 | 13234 | N/A | N/A | CCAACTACTATCATATTGGA | 134 | 1011 |
| 1323309 | N/A | N/A | 1581 | 1600 | GTTCAGAGAAATACTCATCT | 51 | 1012 |
| 1323315 | 25712 | 25731 | N/A | N/A | GTATACCACTCTTTAGTCCT | 44 | 1013 |
| 1323329 | 8196 | 8215 | N/A | N/A | ATTCTAGTAATTTTGGGCCT | 132 | 1014 |

TABLE 14
Reduction of IFNAR1 RNA by 5-10-5 MOE gapmers with mixed PO/PS internucleoside linkages
in A431 cells

| | SEQ ID | SEQ ID | SEQ ID | SEQ ID | | | |
|---|---|---|---|---|---|---|---|
| | NO 1 | NO 1 | NO 2 | NO 2 | | IFNAR1 | |
| Compound | Start | Stop | Start | Stop | | (% | SEQ ID |
| Number | Site | Site | Site | Site | Sequence (5' to 3') | UTC) | NO |
| 1320885 | 18088 | 18107 | N/A | N/A | GTTTTACATCTAATCAAGAT | 72 | 1015 |
| 1320895 | 21050 | 21069 | N/A | N/A | TGTATATTTTTATATTAGCA | 100 | 1016 |
| 1320945 | 8698 | 8717 | N/A | N/A | ACTGATCTCTCACTTTGATA | 91 | 1017 |
| 1320956 | 19210 | 19229 | N/A | N/A | GCAAACCATCCCTTCTGCTT | 116 | 1018 |
| 1320974 | 38273 | 38292 | 5545 | 5564 | TGCTTATTACATAAAATTGT | 122 | 1019 |
| 1320989 | 30183 | 30202 | N/A | N/A | GTAACCAATCACATAATCCG | 94 | 1020 |
| 1321024 | 35613 | 35632 | 2885 | 2904 | TACCTATTTTCTATGACTTC | 82 | 1021 |
| 1321080 | 12350 | 12369 | N/A | N/A | ACTGCTCTCTTTTCACTTCC | 104 | 1022 |
| 1321087 | 37292 | 37311 | 4564 | 4583 | GTTCAGAAAAAATACTTGTC | 54 | 1023 |
| 1321192 | 25710 | 25729 | N/A | N/A | ATACCACTCTTTAGTCCTAA | 23 | 1024 |
| 1321199 | 20491 | 20510 | N/A | N/A | CCACATCACACATCAAACAG | 111 | 1025 |
| 1321253 | 19801 | 19820 | N/A | N/A | TTTAGCATACACCCTTCCAC | 111 | 1026 |
| 1321278 | 16334 | 16353 | N/A | N/A | CTGCCTCTCCTCTTGAATAA | 106 | 1027 |
| 1321285 | 25403 | 25422 | N/A | N/A | CTACCAGTCACCCTTGGTTC | 98 | 1028 |
| 1321322 | 13911 | 13930 | N/A | N/A | CTGCCCCATCTCCCACTGCA | 119 | 1029 |
| 1321344 | 8392 | 8411 | N/A | N/A | AGTCTCTAAAACTTCATCCC | 94 | 1030 |
| 1321368 | 13213 | 13232 | N/A | N/A | AACTACTATCATATTGGAGT | 87 | 1031 |
| 1321402 | 30031 | 30050 | N/A | N/A | AACTACAATTTATTGAATCT | 84 | 1032 |
| 1321405 | 28648 | 28667 | N/A | N/A | CAGGCCACTGCATCCAGCCC | 127 | 1033 |
| 1321414 | 22470 | 22489 | N/A | N/A | AATTTTAGGATTAATTCGCC | 135 | 1034 |
| 1321416 | 27498 | 27517 | N/A | N/A | TAAGTTATATAAATTTGCAA | 118 | 1035 |
| 1321439 | 29100 | 29119 | N/A | N/A | GAATCATGTTAAAAATGCAA | 110 | 1036 |
| 1321455 | 30396 | 30415 | N/A | N/A | TAGGTCAGCTCCAGCAGCCT | 99 | 1037 |
| 1321465 | 26796 | 26815 | N/A | N/A | GCAAAATTCTGAGATGGCCC | 79 | 1038 |
| 1321466 | 38720 | 38739 | 5992 | 6011 | TTCAGGTTCCCAGCCTGAAT | 101 | 1039 |
| 1321500 | 29455 | 29474 | N/A | N/A | TCCTTCCCCCATCATAAAAT | 65 | 1040 |
| 1321601 | 22747 | 22766 | N/A | N/A | ATCATGTAAACTTCAGCAAT | 65 | 1041 |
| 1321637 | 16947 | 16966 | N/A | N/A | TCTGAAATAATTCCTTCTCT | 86 | 1042 |
| 1321664 | 9026 | 9045 | N/A | N/A | TAACTGCAATTTACCATCTA | 90 | 1043 |
| 1321696 | 24525 | 24544 | N/A | N/A | CAATGTCATCCAGTTAGTTA | 68 | 1044 |
| 1321697 | 14640 | 14659 | N/A | N/A | AGAGTCACATACTTTTGATA | 105 | 1045 |
| 1321702 | 18327 | 18346 | N/A | N/A | CCAGTTTTCACTTCCACTTT | 51 | 1046 |
| 1321733 | 22238 | 22257 | N/A | N/A | ATCAAAACAATTACTATGGA | 93 | 1047 |
| 1321750 | 7617 | 7636 | N/A | N/A | AGGTACATTTATACAACTTC | 28 | 1048 |
| 1321780 | 6835 | 6854 | N/A | N/A | CCAGATCGAACCAATCAAAT | 54 | 1049 |
| 1321802 | 24816 | 24835 | N/A | N/A | AGTATCTACTACAAAATTTT | 73 | 1050 |
| 1321811 | 5082 | 5101 | N/A | N/A | GAGCAACATTACAATCTCAT | 58 | 1051 |
| 1321879 | 25565 | 25584 | N/A | N/A | ATCAGCTATCAGAAATACCT | 75 | 1052 |
| 1321930 | 31254 | 31273 | N/A | N/A | CTGCTGCCAAAAAAGCATAT | 101 | 1053 |
| 1321956 | 37665 | 37684 | 4937 | 4956 | AAGTTGCAAATTTCTAGTCA | 55 | 1054 |
| 1321960 | 31043 | 31062 | N/A | N/A | CCTGATCTATAAAATCGGGA | 95 | 1055 |
| 1321978 | 29922 | 29941 | N/A | N/A | TATGATTACCACCACTTCAG | 55 | 1056 |
| 1322017 | N/A | N/A | 1580 | 1599 | TTCAGAGAAATACTCATCTA | 88 | 1057 |
| 1322026 | 33754 | 33773 | N/A | N/A | CCTTTGCTCCTAACACCTCT | 87 | 1058 |
| 1322143 | 33476 | 33495 | N/A | N/A | GCTGATAGAATATTTTAGTC | 86 | 1059 |
| 1322148 | 31854 | 31873 | 1387 | 1406 | ACACTGCTTTTATTCAGCTT | 55 | 1060 |
| 1322149 | 11415 | 11434 | N/A | N/A | TACCTCTTCCAAACTTTACA | 115 | 1061 |
| 1322160 | 27245 | 27264 | N/A | N/A | TAGGACTTTTTCTTTCTGGA | 11 | 1062 |
| 1322176 | 24313 | 24332 | 888 | 907 | TTGCATATGTATAATCCCAT | 15 | 132 |
| 1322190 | 27023 | 27042 | N/A | N/A | AGTGTCTCCTTAGTCCACTC | 88 | 1063 |
| 1322225 | 25214 | 25233 | N/A | N/A | CTCTTTTCTCCCCATAACCC | 85 | 1064 |
| 1322271 | 25794 | 25813 | N/A | N/A | TTATCTCTTTCCTTATGGCT | 63 | 1065 |
| 1322303 | 8144 | 8163 | N/A | N/A | GCTAGTGATTTCCTCAGGGA | 58 | 1066 |
| 1322360 | 34548 | 34567 | 1820 | 1839 | GACACAGTTCATTTCTGGTC | 120 | 1067 |
| 1322459 | 28310 | 28329 | N/A | N/A | CCAGAGAATTACAATCTCCA | 107 | 1068 |
| 1322534 | 35748 | 35767 | 3020 | 3039 | GTCAGTCTCCTATCATTGCC | 47 | 1069 |
| 1322633 | 10137 | 10156 | N/A | N/A | TCTGCTTGACTCCACAGGGA | 66 | 1070 |
| 1322654 | 29516 | 29535 | N/A | N/A | TTGTCAACCCTTTTTTCATT | 81 | 1071 |
| 1322669 | 28033 | 28052 | N/A | N/A | ATTAAGTATTTACAATTGCC | 113 | 1072 |
| 1322686 | 28575 | 28594 | N/A | N/A | AATCATAATTATAACTCTAA | 98 | 1073 |
| 1322733 | 35996 | 36015 | 3268 | 3287 | TCCTAGTTACATTTTTCCCC | 56 | 1074 |
| 1322766 | 24154 | 24173 | N/A | N/A | GCTCGCATTTTATCATTATA | 45 | 1075 |
| 1322787 | 35104 | 35123 | 2376 | 2395 | TTGGTCTGACTCATCTCATC | 59 | 1076 |
| 1322793 | 20102 | 20121 | 451 | 470 | TTTTCTGCTCTTATACGCAA | 48 | 1077 |
| 1322804 | 34198 | 34217 | N/A | N/A | AGAAAACCTATCTTCTGGCA | 80 | 1078 |
| 1322846 | 4740 | 4759 | N/A | N/A | ACTAAATTCTCACAGAACTA | 118 | 1079 |
| 1322854 | 6111 | 6130 | N/A | N/A | AGTACCCACATCCTAGGAAA | 123 | 1080 |
| 1322864 | 26052 | 26071 | N/A | N/A | CTAGAAATAAATTCTGCCAA | 76 | 1081 |
| 1322895 | 25162 | 25181 | N/A | N/A | TTTCTCTATTCATCTCCTAC | 75 | 1082 |
| 1322972 | 25295 | 25314 | N/A | N/A | TGACTTTTCCTTTCCTGTCT | 52 | 1083 |
| 1322989 | 25019 | 25038 | N/A | N/A | TGATCATACAACACTGCAGC | 150 | 1084 |
| 1323042 | 5703 | 5722 | N/A | N/A | ACTGCAACACCCTCTTCCAA | 100 | 1085 |
| 1323089 | 11895 | 11914 | N/A | N/A | CCTTTTCTCCTCTTTCTGTA | 98 | 1086 |
| 1323164 | 9557 | 9576 | N/A | N/A | TCACTCTCCCAGACTACATT | 98 | 1087 |
| 1323183 | 36959 | 36978 | 4231 | 4250 | CAGTGGTGAACACAGGGCCA | 83 | 1088 |
| 1323313 | 26943 | 26962 | N/A | N/A | CCCCAACACAAAATCCCCAA | 105 | 1089 |
| 1323325 | 13582 | 13601 | N/A | N/A | TTTCATTTCACCTTTCAGGA | 107 | 1090 |
| 1323335 | 31683 | 31702 | N/A | N/A | ATATGTGCTTTCTCAATTTT | 78 | 1091 |

TABLE 15
Reduction of IFNAR1 RNA by 5-10-5 MOE gapmers with mixed PO/PS internucleoside linkages in
A431 cells

| | SEQ ID | SEQ | SEQ ID | SEQ | | | |
|---|---|---|---|---|---|---|---|
| | NO 1 | ID NO | NO 2 | ID NO | | IFNAR1 | |
| Compound | Start | 1 Stop | Start | 2 Stop | | (% | SEQ ID |
| Number | Site | Site | Site | Site | Sequence (5' to 3') | UTC) | NO |
| 1320889 | 37291 | 37310 | 4563 | 4582 | TTCAGAAAAAATACTTGTCA | 83 | 1092 |
| 1320899 | 21049 | 21068 | N/A | N/A | GTATATTTTTATATTAGCAT | 109 | 1093 |
| 1320918 | 34178 | 34197 | N/A | N/A | TGCATATTAAAAAGTCGCCT | 80 | 1094 |
| 1320939 | 12347 | 12366 | N/A | N/A | GCTCTCTTTTCACTTCCAGA | 63 | 1095 |
| 1320961 | 33714 | 33733 | N/A | N/A | GGGTACTTGCTTACCTGCCC | 92 | 1096 |
| 1320985 | 13878 | 13897 | N/A | N/A | ATAGTGTATCTCAGCAGCTT | 55 | 1097 |
| 1320990 | 38698 | 38717 | 5970 | 5989 | AAATTGTATTCAATTTCCGA | 77 | 1098 |
| 1321020 | 28561 | 28580 | N/A | N/A | CTCTAAGTTACAAAATTATA | 104 | 1099 |
| 1321045 | 14613 | 14632 | 313 | 332 | GAAAAAGTCACATTCCCGAC | 65 | 1100 |
| 1321065 | 25018 | 25037 | N/A | N/A | GATCATACAACACTGCAGCC | 72 | 1101 |
| 1321101 | 35995 | 36014 | 3267 | 3286 | CCTAGTTACATTTTTCCCCC | 56 | 1102 |
| 1321109 | 19800 | 19819 | N/A | N/A | TTAGCATACACCCTTCCACT | 76 | 1103 |
| 1321130 | 29454 | 29473 | N/A | N/A | CCTTCCCCCATCATAAAATT | 88 | 1104 |
| 1321228 | 26942 | 26961 | N/A | N/A | CCCAACACAAAATCCCCAAA | 100 | 1105 |
| 1321230 | 20091 | 20110 | 440 | 459 | TATACGCAATTTAATTTCTT | 72 | 1106 |
| 1321239 | 37660 | 37679 | 4932 | 4951 | GCAAATTTCTAGTCAGACTC | 30 | 1107 |
| 1321259 | 25213 | 25232 | N/A | N/A | TCTTTTCTCCCCATAACCCA | 77 | 1108 |
| 1321294 | 35102 | 35121 | 2374 | 2393 | GGTCTGACTCATCTCATCCA | 60 | 1109 |
| 1321347 | 22237 | 22256 | N/A | N/A | TCAAAACAATTACTATGGAA | 93 | 1110 |
| 1321349 | 25793 | 25812 | N/A | N/A | TATCTCTTTCCTTATGGCTT | 40 | 1111 |
| 1321386 | 18061 | 18080 | N/A | N/A | CAGAAGCTACTTTTATATTT | 70 | 1112 |
| 1321388 | 4733 | 4752 | N/A | N/A | TCTCACAGAACTATTTGCCT | 77 | 1113 |
| 1321426 | 31682 | 31701 | N/A | N/A | TATGTGCTTTCTCAATTTTT | 55 | 1114 |
| 1321427 | 5061 | 5080 | N/A | N/A | GAGATAACATTTCATTGAGT | 52 | 1115 |
| 1321519 | 35570 | 35589 | 2842 | 2861 | GCTACTGTTCTAATAAGTTT | 76 | 1116 |
| 1321559 | 31041 | 31060 | N/A | N/A | TGATCTATAAAATCGGGACA | 54 | 1117 |
| 1321620 | 6831 | 6850 | N/A | N/A | ATCGAACCAATCAAATGTAC | 82 | 1118 |
| 1321659 | 25706 | 25725 | N/A | N/A | CACTCTTTAGTCCTAAACCA | 97 | 1119 |
| 1321705 | 25293 | 25312 | N/A | N/A | ACTTTTCCTTTCCTGTCTTA | 104 | 1120 |
| 1321747 | 24454 | 24473 | N/A | N/A | ACCCACCTCCCAGTCGGTCA | 99 | 1121 |
| 1321809 | 9025 | 9044 | N/A | N/A | AACTGCAATTTACCATCTAA | 80 | 1122 |
| 1321899 | 10107 | 10126 | N/A | N/A | AGCTGCTTAAAGTTTAGCTT | 95 | 1123 |
| 1321926 | 13581 | 13600 | N/A | N/A | TTCATTTCACCTTTCAGGAC | 75 | 1124 |
| 1322059 | 27018 | 27037 | N/A | N/A | CTCCTTAGTCCACTCTCCCA | 97 | 1125 |
| 1322102 | 31853 | 31872 | 1386 | 1405 | CACTGCTTTTATTCAGCTTT | 76 | 1126 |
| 1322110 | 33475 | 33494 | N/A | N/A | CTGATAGAATATTTTAGTCT | 67 | 1127 |
| 1322131 | 24153 | 24172 | N/A | N/A | CTCGCATTTTATCATTATAA | 20 | 1128 |
| 1322152 | 34547 | 34566 | 1819 | 1838 | ACACAGTTCATTTCTGGTCA | 50 | 1129 |
| 1322154 | 36833 | 36852 | 4105 | 4124 | ACAAGGCTTTTCCAAAGGTC | 52 | 1130 |
| 1322157 | 19182 | 19201 | N/A | N/A | CCGTAATTTCTTCTATTACA | 99 | 1131 |
| 1322172 | 13178 | 13197 | N/A | N/A | CGTATAGTAATATTTACTTT | 99 | 1132 |
| 1322176 | 24313 | 24332 | 888 | 907 | TTGCATATGTATAATCCCAT | 12 | 132 |
| 1322182 | 6090 | 6109 | N/A | N/A | GTATACTACATATTTGTGGA | 66 | 1133 |
| 1322199 | 29098 | 29117 | N/A | N/A | ATCATGTTAAAAATGCAAAT | 91 | 1134 |
| 1322224 | 18324 | 18343 | N/A | N/A | GTTTTCACTTCCACTTTTAC | 78 | 1135 |
| 1322242 | 38272 | 38291 | 5544 | 5563 | GCTTATTACATAAAATTGTT | 85 | 1136 |
| 1322267 | 30182 | 30201 | N/A | N/A | TAACCAATCACATAATCCGG | 100 | 1137 |
| 1322308 | 22746 | 22765 | N/A | N/A | TCATGTAAACTTCAGCAATA | 59 | 1138 |
| 1322332 | 29921 | 29940 | N/A | N/A | ATGATTACCACCACTTCAGA | 56 | 1139 |
| 1322380 | 28032 | 28051 | N/A | N/A | TTAAGTATTTACAATTGCCA | 75 | 1140 |
| 1322390 | 30387 | 30406 | N/A | N/A | TCCAGCAGCCTCTAATCCTC | 94 | 1141 |
| 1322410 | 25161 | 25180 | N/A | N/A | TTCTCTATTCATCTCCTACA | 72 | 1142 |
| 1322427 | 11413 | 11432 | N/A | N/A | CCTCTTCCAAACTTTACAGA | 100 | 1143 |
| 1322458 | 24814 | 24833 | N/A | N/A | TATCTACTACAAAATTTTGT | 99 | 1144 |
| 1322471 | 16327 | 16346 | N/A | N/A | TCCTCTTGAATAATTAAGTA | 83 | 1145 |
| 1322474 | 11883 | 11902 | N/A | N/A | TTTCTGTAACTTACATAGTA | 110 | 1146 |
| 1322529 | 25564 | 25583 | N/A | N/A | TCAGCTATCAGAAATACCTC | 72 | 1147 |
| 1322584 | 8682 | 8701 | N/A | N/A | GATAAGTTATATATTTTTTA | 98 | 1148 |
| 1322623 | 26786 | 26805 | N/A | N/A | GAGATGGCCCCCAAGATTCC | 98 | 1149 |
| 1322640 | 8391 | 8410 | N/A | N/A | GTCTCTAAAACTTCATCCCT | 100 | 1150 |
| 1322665 | 9499 | 9518 | N/A | N/A | TTGTTGTTAATCCTGTGCCA | 59 | 1151 |
| 1322671 | 7980 | 7999 | N/A | N/A | TTGCTCTATTATTATTGGCA | 55 | 1152 |
| 1322786 | 26042 | 26061 | N/A | N/A | ATTCTGCCAACAACATGTGA | 82 | 1153 |
| 1322869 | 32768 | 32787 | N/A | N/A | ATACCTCATCTATACTGGAA | 73 | 1154 |
| 1322873 | 28308 | 28327 | N/A | N/A | AGAGAATTACAATCTCCAGT | 111 | 1155 |
| 1322875 | 29515 | 29534 | N/A | N/A | TGTCAACCCTTTTTTCATTA | 32 | 1156 |
| 1322941 | 30024 | 30043 | N/A | N/A | ATTTATTGAATCTCTACTAC | 75 | 1157 |
| 1322988 | 27244 | 27263 | N/A | N/A | AGGACTTTTTCTTTCTGGAA | 26 | 1158 |
| 1322996 | 27484 | 27503 | N/A | N/A | TTGCAAATAAAAAATTGTTT | 119 | 1159 |
| 1323041 | 5702 | 5721 | N/A | N/A | CTGCAACACCCTCTTCCAAA | 73 | 1160 |
| 1323091 | 31242 | 31261 | N/A | N/A | AAGCATATGATCTATTCCTA | 34 | 1161 |
| 1323100 | 35747 | 35766 | 3019 | 3038 | TCAGTCTCCTATCATTGCCA | 24 | 1162 |
| 1323139 | 20489 | 20508 | N/A | N/A | ACATCACACATCAAACAGCC | 69 | 1163 |
| 1323160 | 28639 | 28658 | N/A | N/A | GCATCCAGCCCACATAAAGT | 90 | 1164 |
| 1323162 | 16946 | 16965 | N/A | N/A | CTGAAATAATTCCTTCTCTA | 107 | 1165 |
| 1323213 | 25402 | 25421 | N/A | N/A | TACCAGTCACCCTTGGTTCA | 83 | 1166 |
| 1323249 | 7614 | 7633 | N/A | N/A | TACATTTATACAACTTCTGA | 109 | 1167 |
| 1323264 | 22469 | 22488 | N/A | N/A | ATTTTAGGATTAATTCGCCT | 58 | 1168 |

TABLE 16
Reduction of IFNAR1 RNA by 5-10-5 MOE gapmers with mixed PO/PS internucleoside linkages in
A431 cells

| | SEQ ID | SEQ | SEQ ID | SEQ | | | |
|---|---|---|---|---|---|---|---|
| | NO 1 | ID NO | NO 2 | ID NO | | IFNAR1 | |
| Compound | Start | 1 Stop | Start | 2 Stop | | (% | SEQ ID |
| Number | Site | Site | Site | Site | Sequence (5' to 3') | UTC) | NO |
| 1320891 | 13865 | 13884 | N/A | N/A | GCAGCTTTCCCCTCTGTGTT | 98 | 1169 |
| 1320900 | 25704 | 25723 | N/A | N/A | CTCTTTAGTCCTAAACCACA | 69 | 1170 |
| 1320936 | 14607 | 14626 | 307 | 326 | GTCACATTCCCGACAGACTC | 100 | 1171 |
| 1320954 | 4732 | 4751 | N/A | N/A | CTCACAGAACTATTTGCCTT | 82 | 1172 |
| 1320966 | 18059 | 18078 | N/A | N/A | GAAGCTACTTTTATATTTTC | 64 | 1173 |
| 1320984 | 38659 | 38678 | 5931 | 5950 | CAGGAGAGATCTACTTATCT | 75 | 1174 |
| 1321063 | 29918 | 29937 | N/A | N/A | ATTACCACCACTTCAGAGAA | 71 | 1175 |
| 1321078 | 35746 | 35765 | 3018 | 3037 | CAGTCTCCTATCATTGCCAT | 45 | 1176 |
| 1321148 | 6052 | 6071 | N/A | N/A | TATCATGTACCACACAGGTA | 64 | 1177 |
| 1321167 | 38205 | 38224 | 5477 | 5496 | AGTTTGTTCCATAGAAACAC | 120 | 1178 |
| 1321189 | 29449 | 29468 | N/A | N/A | CCCCATCATAAAATTAAATA | 100 | 1179 |
| 1321263 | 25160 | 25179 | N/A | N/A | TCTCTATTCATCTCCTACAA | 77 | 1180 |
| 1321335 | 34166 | 34185 | N/A | N/A | AGTCGCCTAAGAACATACTA | 54 | 1181 |
| 1321336 | 25289 | 25308 | N/A | N/A | TTCCTTTCCTGTCTTAGCTA | 63 | 1182 |
| 1321383 | 25212 | 25231 | N/A | N/A | CTTTTCTCCCCATAACCCAT | 75 | 1183 |
| 1321438 | 8388 | 8407 | N/A | N/A | TCTAAAACTTCATCCCTGAA | 131 | 1184 |
| 1321446 | 31681 | 31700 | N/A | N/A | ATGTGCTTTCTCAATTTTTT | 36 | 1185 |
| 1321459 | 7979 | 7998 | N/A | N/A | TGCTCTATTATTATTGGCAA | 105 | 1186 |
| 1321495 | 7588 | 7607 | N/A | N/A | GAGCAACATTACAATCTCAC | 68 | 1187 |
| 1321498 | 16915 | 16934 | N/A | N/A | TGTTCATAAGGAAATTCCAA | 71 | 1188 |
| 1321543 | 33456 | 33475 | N/A | N/A | TTCTGGATATATACAGATGC | 113 | 1189 |
| 1321569 | 30181 | 30200 | N/A | N/A | AACCAATCACATAATCCGGC | 76 | 1190 |
| 1321619 | 29088 | 29107 | N/A | N/A | AAATGCAAATTCCTGAGTTC | 91 | 1191 |
| 1321640 | 22223 | 22242 | N/A | N/A | ATGGAACTTTATTAATACAA | 78 | 1192 |
| 1321653 | 18318 | 18337 | N/A | N/A | ACTTCCACTTTTACATATCT | 69 | 1193 |
| 1321793 | 11847 | 11866 | N/A | N/A | TAATGATGTCCCATAAGTCT | 100 | 1194 |
| 1321850 | 9469 | 9488 | N/A | N/A | TGAGCTATAAACTTAAGGTC | 71 | 1195 |
| 1321852 | 29512 | 29531 | N/A | N/A | CAACCCTTTTTTCATTACCT | 91 | 1196 |
| 1321910 | 24150 | 24169 | N/A | N/A | GCATTTTATCATTATAAGGT | 9 | 1197 |
| 1321911 | 31842 | 31861 | 1375 | 1394 | TTCAGCTTTTCATCCATGGT | 57 | 1198 |
| 1321969 | 21034 | 21053 | N/A | N/A | AGCATATTAAACATTAAAAC | 108 | 1199 |
| 1322005 | 25792 | 25811 | N/A | N/A | ATCTCTTTCCTTATGGCTTC | 44 | 1200 |
| 1322036 | 25561 | 25580 | N/A | N/A | GCTATCAGAAATACCTCTCA | 52 | 1201 |
| 1322042 | 5036 | 5055 | N/A | N/A | ACATGATTATTTCTTTGGGA | 28 | 1202 |
| 1322054 | 35547 | 35566 | 2819 | 2838 | ATCAGAGGTCTTAATGCATA | 29 | 1203 |
| 1322076 | 27017 | 27036 | N/A | N/A | TCCTTAGTCCACTCTCCCAC | 95 | 1204 |
| 1322176 | 24313 | 24332 | 888 | 907 | TTGCATATGTATAATCCCAT | 10 | 132 |
| 1322236 | 25394 | 25413 | N/A | N/A | ACCCTTGGTTCAAAATTAAC | 95 | 1205 |
| 1322248 | 19799 | 19818 | N/A | N/A | TAGCATACACCCTTCCACTC | 79 | 1206 |
| 1322289 | 32728 | 32747 | 1532 | 1551 | GAAGACATAATTGATGCATC | 38 | 1207 |
| 1322290 | 28560 | 28579 | N/A | N/A | TCTAAGTTACAAAATTATAC | 136 | 1208 |
| 1322293 | 12315 | 12334 | N/A | N/A | TGGAGCATTTCTCATAAGGC | 83 | 1209 |
| 1322319 | 22457 | 22476 | N/A | N/A | ATTCGCCTAATTTTTCTCTC | 55 | 1210 |
| 1322384 | 31241 | 31260 | N/A | N/A | AGCATATGATCTATTCCTAA | 19 | 1211 |
| 1322419 | 33713 | 33732 | N/A | N/A | GGTACTTGCTTACCTGCCCT | 95 | 1212 |
| 1322442 | 26941 | 26960 | N/A | N/A | CCAACACAAAATCCCCAAAA | 121 | 1213 |
| 1322503 | 36426 | 36445 | 3698 | 3717 | TCAATGACCCACCATGCTCT | 100 | 1214 |
| 1322511 | 35101 | 35120 | 2373 | 2392 | GTCTGACTCATCTCATCCAA | 64 | 1215 |
| 1322512 | 27223 | 27242 | N/A | N/A | GCCAGCTGCTAAACATGCGC | 110 | 1216 |
| 1322516 | 9022 | 9041 | N/A | N/A | TGCAATTTACCATCTAAGTC | 64 | 1217 |
| 1322530 | 26761 | 26780 | N/A | N/A | CCTGGTGTACACATCCTGTA | 116 | 1218 |
| 1322553 | 20487 | 20506 | N/A | N/A | ATCACACATCAAACAGCCTC | 84 | 1219 |
| 1322556 | 13177 | 13196 | N/A | N/A | GTATAGTAATATTTACTTTA | 95 | 1220 |
| 1322663 | 19176 | 19195 | N/A | N/A | TTTCTTCTATTACATCATCA | 71 | 1221 |
| 1322689 | 13580 | 13599 | N/A | N/A | TCATTTCACCTTTCAGGACT | 117 | 1222 |
| 1322700 | 28307 | 28326 | N/A | N/A | GAGAATTACAATCTCCAGTA | 86 | 1223 |
| 1322707 | 20090 | 20109 | 439 | 458 | ATACGCAATTTAATTTCTTC | 51 | 1224 |
| 1322712 | 16324 | 16343 | N/A | N/A | TCTTGAATAATTAAGTAGAA | 133 | 1225 |
| 1322714 | 5701 | 5720 | N/A | N/A | TGCAACACCCTCTTCCAAAC | 78 | 1226 |
| 1322747 | 27456 | 27475 | N/A | N/A | GAGGTAATAAATAAATTCAT | 66 | 1227 |
| 1322837 | 9896 | 9915 | N/A | N/A | GCAGCTTCCTCAGCTTGGCT | 126 | 1228 |
| 1322843 | 30022 | 30041 | N/A | N/A | TTATTGAATCTCTACTACTT | 83 | 1229 |
| 1322889 | 31019 | 31038 | N/A | N/A | TATTGCTGCTATCTGTATCA | 39 | 1230 |
| 1322901 | 28638 | 28657 | N/A | N/A | CATCCAGCCCACATAAAGTT | 95 | 1231 |
| 1322950 | 24813 | 24832 | N/A | N/A | ATCTACTACAAAATTTTGTC | 88 | 1232 |
| 1322956 | 24395 | 24414 | N/A | N/A | AGAAGCATAATCAAAACAAA | 102 | 1233 |
| 1322983 | 22723 | 22742 | N/A | N/A | GGAAGATGCCAAAATTGACA | 75 | 1234 |
| 1323014 | 37637 | 37656 | 4909 | 4928 | AAAGTTCACAATTCTAGGGA | 103 | 1235 |
| 1323022 | 37281 | 37300 | 4553 | 4572 | ATACTTGTCACTTACAGCTA | 85 | 1236 |
| 1323034 | 34537 | 34556 | 1809 | 1828 | TTTCTGGTCATACAAAGTCC | 78 | 1237 |
| 1323085 | 11412 | 11431 | N/A | N/A | CTCTTCCAAACTTTACAGAC | 119 | 1238 |
| 1323095 | 6760 | 6779 | N/A | N/A | GGACCTTGACCACCTTGGGC | 126 | 1239 |
| 1323136 | 26040 | 26059 | N/A | N/A | TCTGCCAACAACATGTGAGC | 92 | 1240 |
| 1323194 | 35994 | 36013 | 3266 | 3285 | CTAGTTACATTTTTCCCCCT | 63 | 1241 |
| 1323231 | 25004 | 25023 | N/A | N/A | GCAGCCTCAATTCCTGGCCT | 140 | 1242 |
| 1323285 | 8661 | 8680 | N/A | N/A | AAGATCAGCTTTTAAATTCA | 86 | 1243 |
| 1323294 | 28028 | 28047 | N/A | N/A | GTATTTACAATTGCCAGACA | 93 | 1244 |
| 1323317 | 30386 | 30405 | N/A | N/A | CCAGCAGCCTCTAATCCTCC | 112 | 1245 |

TABLE 17
Reduction of IFNAR1 RNA by 5-10-5 MOE gapmers with mixed PO/PS internucleoside linkages in
A431 cells

| | SEQ ID | SEQ | SEQ ID | SEQ | | | |
|---|---|---|---|---|---|---|---|
| | NO 1 | ID NO | NO 2 | ID NO | | IFNAR1 | |
| Compound | Start | 1 Stop | Start | 2 Stop | | (% | SEQ ID |
| Number | Site | Site | Site | Site | Sequence (5' to 3') | UTC) | NO |
| 1320909 | 24115 | 24134 | N/A | N/A | TTTGTATTCACACTATGTAA | 73 | 1246 |
| 1320923 | 25784 | 25803 | N/A | N/A | CCTTATGGCTTCTTTGGTCT | 31 | 1247 |
| 1320925 | 7585 | 7604 | N/A | N/A | CAACATTACAATCTCACTGA | 68 | 1248 |
| 1320950 | 8660 | 8679 | N/A | N/A | AGATCAGCTTTTAAATTCAT | 94 | 1249 |
| 1320982 | 20087 | 20106 | 436 | 455 | CGCAATTTAATTTCTTCATA | 51 | 1250 |
| 1321006 | 13864 | 13883 | N/A | N/A | CAGCTTTCCCCTCTGTGTTA | 124 | 1251 |
| 1321036 | 35543 | 35562 | 2815 | 2834 | GAGGTCTTAATGCATAGTAA | 27 | 1252 |
| 1321054 | 6759 | 6778 | N/A | N/A | GACCTTGACCACCTTGGGCA | 99 | 1253 |
| 1321064 | 26760 | 26779 | N/A | N/A | CTGGTGTACACATCCTGTAT | 105 | 1254 |
| 1321095 | 29893 | 29912 | N/A | N/A | AGCAAAGTCTCCAAGAGGTA | 44 | 1255 |
| 1321097 | 25211 | 25230 | N/A | N/A | TTTTCTCCCCATAACCCATT | 95 | 1256 |
| 1321100 | 12314 | 12333 | N/A | N/A | GGAGCATTTCTCATAAGGCT | 90 | 1257 |
| 1321119 | 35745 | 35764 | 3017 | 3036 | AGTCTCCTATCATTGCCATT | 45 | 1258 |
| 1321165 | 24812 | 24831 | N/A | N/A | TCTACTACAAAATTTTGTCA | 89 | 1259 |
| 1321174 | 37280 | 37299 | 4552 | 4571 | TACTTGTCACTTACAGCTAA | 84 | 1260 |
| 1321181 | 5673 | 5692 | N/A | N/A | GTTACTAGCATTATGCTTCA | 103 | 1261 |
| 1321217 | 30384 | 30403 | N/A | N/A | AGCAGCCTCTAATCCTCCTT | 89 | 1262 |
| 1321265 | 25159 | 25178 | N/A | N/A | CTCTATTCATCTCCTACAAT | 71 | 1263 |
| 1321280 | 11818 | 11837 | N/A | N/A | TCACTTGTTTTTTCTACAAT | 82 | 1264 |
| 1321300 | 25560 | 25579 | N/A | N/A | CTATCAGAAATACCTCTCAT | 71 | 1265 |
| 1321365 | 27455 | 27474 | N/A | N/A | AGGTAATAAATAAATTCATC | 115 | 1266 |
| 1321366 | 19797 | 19816 | N/A | N/A | GCATACACCCTTCCACTCTT | 53 | 1267 |
| 1321371 | 21014 | 21033 | N/A | N/A | TGGTAAAGTTTTCAATCCAT | 64 | 1268 |
| 1321512 | 25703 | 25722 | N/A | N/A | TCTTTAGTCCTAAACCACAC | 97 | 1269 |
| 1321516 | 26038 | 26057 | N/A | N/A | TGCCAACAACATGTGAGCTT | 100 | 1270 |
| 1321517 | 28295 | 28314 | N/A | N/A | CTCCAGTAAAAACTACTGCC | 118 | 1271 |
| 1321523 | 36313 | 36332 | 3585 | 3604 | ATCACAGCCCTCCCGAGGGC | 148 | 1272 |
| 1321528 | 29448 | 29467 | N/A | N/A | CCCATCATAAAATTAAATAC | 124 | 1273 |
| 1321532 | 25280 | 25299 | N/A | N/A | TGTCTTAGCTATACTTGCCT | 95 | 1274 |
| 1321554 | 25393 | 25412 | N/A | N/A | CCCTTGGTTCAAAATTAACA | 98 | 1275 |
| 1321561 | 27016 | 27035 | N/A | N/A | CCTTAGTCCACTCTCCCACA | 92 | 1276 |
| 1321608 | 31015 | 31034 | N/A | N/A | GCTGCTATCTGTATCAGTCA | 36 | 1277 |
| 1321609 | 28559 | 28578 | N/A | N/A | CTAAGTTACAAAATTATACT | 122 | 1278 |
| 1321612 | 37617 | 37636 | 4889 | 4908 | GCTGTTCTAATTTTTAGTTA | 95 | 1279 |
| 1321641 | 38204 | 38223 | 5476 | 5495 | GTTTGTTCCATAGAAACACT | 98 | 1280 |
| 1321654 | 14599 | 14618 | 299 | 318 | CCCGACAGACTCATCGCTCC | 95 | 1281 |
| 1321675 | 19173 | 19192 | N/A | N/A | CTTCTATTACATCATCAGAA | 67 | 1282 |
| 1321678 | 11411 | 11430 | N/A | N/A | TCTTCCAAACTTTACAGACA | 124 | 1283 |
| 1321709 | 20485 | 20504 | N/A | N/A | CACACATCAAACAGCCTCCT | 93 | 1284 |
| 1321734 | 33446 | 33465 | N/A | N/A | ATACAGATGCTCCTAACTTA | 54 | 1285 |
| 1321764 | 24394 | 24413 | N/A | N/A | GAAGCATAATCAAAACAAAC | 111 | 1286 |
| 1321819 | 7957 | 7976 | N/A | N/A | TCCTTTTAATAATTTTTTCA | 93 | 1287 |
| 1321848 | 31680 | 31699 | N/A | N/A | TGTGCTTTCTCAATTTTTTA | 56 | 1288 |
| 1321858 | 34165 | 34184 | N/A | N/A | GTCGCCTAAGAACATACTAA | 96 | 1289 |
| 1321869 | 16907 | 16926 | N/A | N/A | AGGAAATTCCAAACTAAGGG | 60 | 1290 |
| 1321915 | 22222 | 22241 | N/A | N/A | TGGAACTTTATTAATACAAT | 93 | 1291 |
| 1322056 | 13570 | 13589 | N/A | N/A | TTTCAGGACTTCCTTAAGCA | 89 | 1292 |
| 1322091 | 4731 | 4750 | N/A | N/A | TCACAGAACTATTTGCCTTA | 73 | 1293 |
| 1322176 | 24313 | 24332 | 888 | 907 | TTGCATATGTATAATCCCAT | 12 | 132 |
| 1322180 | 38633 | 38652 | 5905 | 5924 | CTGAAGAGCCTCCTTGGAAC | 81 | 1294 |
| 1322184 | 27992 | 28011 | N/A | N/A | GGTTACAGAAATAAATAGTA | 64 | 1295 |
| 1322237 | 18058 | 18077 | N/A | N/A | AAGCTACTTTTATATTTTCT | 67 | 1296 |
| 1322257 | 35992 | 36011 | 3264 | 3283 | AGTTACATTTTTCCCCCTCA | 52 | 1297 |
| 1322264 | 33706 | 33725 | N/A | N/A | GCTTACCTGCCCTTAGTGAC | 69 | 1298 |
| 1322355 | 9817 | 9836 | N/A | N/A | AGCTGGGATCTTCTTGTTTA | 93 | 1299 |
| 1322414 | 31840 | 31859 | 1373 | 1392 | CAGCTTTTCATCCATGGTGT | 38 | 1300 |
| 1322415 | 9467 | 9486 | N/A | N/A | AGCTATAAACTTAAGGTCTC | 75 | 1301 |
| 1322430 | 27222 | 27241 | N/A | N/A | CCAGCTGCTAAACATGCGCC | 106 | 1302 |
| 1322431 | 30180 | 30199 | N/A | N/A | ACCAATCACATAATCCGGCA | 76 | 1303 |
| 1322470 | 32677 | 32696 | 1481 | 1500 | CGGGAGAGCAAATAATGCAA | 21 | 1304 |
| 1322478 | 5035 | 5054 | N/A | N/A | CATGATTATTTCTTTGGGAA | 43 | 1305 |
| 1322504 | 18316 | 18335 | N/A | N/A | TTCCACTTTTACATATCTGA | 50 | 1306 |
| 1322508 | 29076 | 29095 | N/A | N/A | CTGAGTTCCATCCCCAGAGA | 88 | 1307 |
| 1322582 | 6051 | 6070 | N/A | N/A | ATCATGTACCACACAGGTAT | 96 | 1308 |
| 1322602 | 8387 | 8406 | N/A | N/A | CTAAAACTTCATCCCTGAAT | 131 | 1309 |
| 1322604 | 34536 | 34555 | 1808 | 1827 | TTCTGGTCATACAAAGTCCT | 91 | 1310 |
| 1322629 | 35100 | 35119 | 2372 | 2391 | TCTGACTCATCTCATCCAAT | 56 | 1311 |
| 1322643 | 22701 | 22720 | N/A | N/A | CTGTTTATATATTTATTGAA | 102 | 1312 |
| 1322752 | 9021 | 9040 | N/A | N/A | GCAATTTACCATCTAAGTCT | 65 | 1313 |
| 1322841 | 29511 | 29530 | N/A | N/A | AACCCTTTTTTCATTACCTC | 103 | 1314 |
| 1322850 | 16323 | 16342 | N/A | N/A | CTTGAATAATTAAGTAGAAA | 124 | 1315 |
| 1323001 | 30021 | 30040 | N/A | N/A | TATTGAATCTCTACTACTTG | 74 | 1316 |
| 1323084 | 22456 | 22475 | N/A | N/A | TTCGCCTAATTTTTCTCTCA | 58 | 1317 |
| 1323099 | 31237 | 31256 | N/A | N/A | TATGATCTATTCCTAAGAGA | 71 | 1318 |
| 1323117 | 26938 | 26957 | N/A | N/A | ACACAAAATCCCCAAAAGCC | 117 | 1319 |
| 1323197 | 24921 | 24940 | N/A | N/A | GGCCAGTTCTCTTTCATTTA | 111 | 1320 |
| 1323250 | 28637 | 28656 | N/A | N/A | ATCCAGCCCACATAAAGTTT | 106 | 1321 |
| 1323304 | 13034 | 13053 | N/A | N/A | TGTCTGTTTAATCTGACATA | 116 | 1322 |

TABLE 18
Reduction of IFNAR1 RNA by 5-10-5 MOE gapmers with mixed PO/PS internucleoside linkages in
A431 cells

| | SEQ ID | SEQ | SEQ ID | SEQ | | | |
|---|---|---|---|---|---|---|---|
| | NO 1 | ID NO | NO 2 | ID NO | | IFNAR1 | |
| Compound | Start | 1 Stop | Start | 2 Stop | | (% | SEQ ID |
| Number | Site | Site | Site | Site | Sequence (5' to 3') | UTC) | NO |
| 1320903 | 22219 | 22238 | N/A | N/A | AACTTTATTAATACAATGCC | 91 | 1323 |
| 1320912 | 35736 | 35755 | 3008 | 3027 | TCATTGCCATTTTCTGGTCC | 48 | 1324 |
| 1320932 | 9806 | 9825 | N/A | N/A | TCTTGTTTATCTCCTTGCCA | 85 | 1325 |
| 1320995 | 37562 | 37581 | 4834 | 4853 | AAGGAATAAGACCTACATCA | 67 | 1326 |
| 1321016 | 6035 | 6054 | N/A | N/A | GTATATGGTTTCCTAAGCCA | 73 | 1327 |
| 1321019 | 31011 | 31030 | N/A | N/A | CTATCTGTATCAGTCAGCTA | 37 | 1328 |
| 1321108 | 9446 | 9465 | N/A | N/A | CCTGAGCCTTTCCCTAGGTA | 89 | 1329 |
| 1321153 | 22699 | 22718 | N/A | N/A | GTTTATATATTTATTGAATC | 98 | 1330 |
| 1321196 | 37267 | 37286 | 4539 | 4558 | CAGCTAAGCATATACTGATA | 82 | 1331 |
| 1321202 | 35533 | 35552 | 2805 | 2824 | TGCATAGTAAAAGATTGCCT | 91 | 1332 |
| 1321204 | 20479 | 20498 | N/A | N/A | TCAAACAGCCTCCTCTGGAA | 101 | 1333 |
| 1321206 | 13845 | 13864 | N/A | N/A | AACTGCATCATAACTGGTGA | 104 | 1334 |
| 1321214 | 28558 | 28577 | N/A | N/A | TAAGTTACAAAATTATACTA | 111 | 1335 |
| 1321266 | 27015 | 27034 | N/A | N/A | CTTAGTCCACTCTCCCACAT | 84 | 1336 |
| 1321320 | 26758 | 26777 | N/A | N/A | GGTGTACACATCCTGTATAA | 89 | 1337 |
| 1321334 | 24918 | 24937 | N/A | N/A | CAGTTCTCTTTCATTTATGC | 46 | 1338 |
| 1321381 | 23677 | 23696 | N/A | N/A | ATAGAATATCCCCAACACAC | 98 | 1339 |
| 1321385 | 36292 | 36311 | 3564 | 3583 | GCTGCCTTCAACCTTTTCTT | 90 | 1340 |
| 1321472 | 34162 | 34181 | N/A | N/A | GCCTAAGAACATACTAATTG | 94 | 1341 |
| 1321487 | 38623 | 38642 | 5895 | 5914 | TCCTTGGAACGAACTAATCC | 102 | 1342 |
| 1321563 | 25558 | 25577 | N/A | N/A | ATCAGAAATACCTCTCATTA | 70 | 1343 |
| 1321658 | 28294 | 28313 | N/A | N/A | TCCAGTAAAAACTACTGCCT | 85 | 1344 |
| 1321682 | 31818 | 31837 | 1351 | 1370 | GCTCTGGCTTTCACACAATA | 43 | 1345 |
| 1321698 | 25158 | 25177 | N/A | N/A | TCTATTCATCTCCTACAATT | 91 | 1346 |
| 1321699 | 26937 | 26956 | N/A | N/A | CACAAAATCCCCAAAAGCCT | 111 | 1347 |
| 1321704 | 25279 | 25298 | N/A | N/A | GTCTTAGCTATACTTGCCTT | 67 | 1348 |
| 1321746 | 29073 | 29092 | N/A | N/A | AGTTCCATCCCCAGAGATAA | 80 | 1349 |
| 1321749 | 25392 | 25411 | N/A | N/A | CCTTGGTTCAAAATTAACAC | 107 | 1350 |
| 1321768 | 27447 | 27466 | N/A | N/A | AATAAATTCATCTTGTCCTA | 75 | 1351 |
| 1321790 | 7931 | 7950 | N/A | N/A | GTTATGTAACATTAACATAC | 77 | 1352 |
| 1321799 | 25990 | 26009 | N/A | N/A | GACTGACTCCTTGACTGCTT | 66 | 1353 |
| 1321826 | 13011 | 13030 | N/A | N/A | ATAGCAATTCCTGACAGCTT | 89 | 1354 |
| 1321871 | 33443 | 33462 | N/A | N/A | CAGATGCTCCTAACTTACAA | 74 | 1355 |
| 1321894 | 4958 | 4977 | N/A | N/A | TGGACCTCTCCTCTCAACAA | 79 | 1356 |
| 1321907 | 32676 | 32695 | 1480 | 1499 | GGGAGAGCAAATAATGCAAT | 22 | 1357 |
| 1321938 | 35097 | 35116 | 2369 | 2388 | GACTCATCTCATCCAATGCA | 50 | 1358 |
| 1321979 | 18057 | 18076 | N/A | N/A | AGCTACTTTTATATTTTCTT | 53 | 1359 |
| 1321983 | 18313 | 18332 | N/A | N/A | CACTTTTACATATCTGAGGC | 43 | 1360 |
| 1322015 | 5669 | 5688 | N/A | N/A | CTAGCATTATGCTTCAGCCA | 97 | 1361 |
| 1322035 | 19165 | 19184 | N/A | N/A | ACATCATCAGAAACCACAAA | 87 | 1362 |
| 1322037 | 11817 | 11836 | N/A | N/A | CACTTGTTTTTTCTACAATT | 88 | 1363 |
| 1322055 | 31677 | 31696 | N/A | N/A | GCTTTCTCAATTTTTTATGT | 37 | 1364 |
| 1322130 | 27221 | 27240 | N/A | N/A | CAGCTGCTAAACATGCGCCA | 98 | 1365 |
| 1322169 | 22454 | 22473 | N/A | N/A | CGCCTAATTTTTCTCTCACA | 40 | 1366 |
| 1322176 | 24313 | 24332 | 888 | 907 | TTGCATATGTATAATCCCAT | 3 | 132 |
| 1322191 | 13569 | 13588 | N/A | N/A | TTCAGGACTTCCTTAAGCAT | 90 | 1367 |
| 1322238 | 8659 | 8678 | N/A | N/A | GATCAGCTTTTAAATTCATT | 66 | 1368 |
| 1322263 | 21012 | 21031 | N/A | N/A | GTAAAGTTTTCAATCCATTT | 13 | 1369 |
| 1322273 | 11394 | 11413 | N/A | N/A | ACAGTGGCTTTCAAAGATAA | 97 | 1370 |
| 1322282 | 12313 | 12332 | N/A | N/A | GAGCATTTCTCATAAGGCTG | 85 | 1371 |
| 1322329 | 35988 | 36007 | 3260 | 3279 | ACATTTTTCCCCCTCAGTTC | 78 | 1372 |
| 1322342 | 25702 | 25721 | N/A | N/A | CTTTAGTCCTAAACCACACA | 85 | 1373 |
| 1322404 | 34515 | 34534 | 1787 | 1806 | CTGTAGTTCTTCACTTGTTT | 33 | 1374 |
| 1322408 | 8980 | 8999 | N/A | N/A | TGCAATAGACTCCAGAGTTC | 83 | 1375 |
| 1322420 | 30018 | 30037 | N/A | N/A | TGAATCTCTACTACTTGTCC | 33 | 1376 |
| 1322466 | 25775 | 25794 | N/A | N/A | TTCTTTGGTCTCTTTAGCCC | 23 | 1377 |
| 1322479 | 7570 | 7589 | N/A | N/A | ACTGAGATAACTTTCAGGAT | 70 | 1378 |
| 1322490 | 27988 | 28007 | N/A | N/A | ACAGAAATAAATAGTATCCA | 90 | 1379 |
| 1322498 | 38177 | 38196 | 5449 | 5468 | CGGTTATGTCCTTCTACAAT | 51 | 1380 |
| 1322542 | 25207 | 25226 | N/A | N/A | CTCCCCATAACCCATTTTTC | 95 | 1381 |
| 1322706 | 16297 | 16316 | N/A | N/A | AGGAAGAGACATCAACACTC | 69 | 1382 |
| 1322710 | 33688 | 33707 | N/A | N/A | ACTTGCTCAAATTCACAAAA | 64 | 1383 |
| 1322909 | 29892 | 29911 | N/A | N/A | GCAAAGTCTCCAAGAGGTAA | 46 | 1384 |
| 1322957 | 30142 | 30161 | N/A | N/A | ACTGAGACAATTCATGTACA | 84 | 1385 |
| 1322958 | 29510 | 29529 | N/A | N/A | ACCCTTTTTTCATTACCTCC | 83 | 1386 |
| 1322963 | 6749 | 6768 | N/A | N/A | ACCTTGGGCACATGTGGCCA | 92 | 1387 |
| 1322968 | 30380 | 30399 | N/A | N/A | GCCTCTAATCCTCCTTGGAC | 109 | 1388 |
| 1323047 | 14598 | 14617 | 298 | 317 | CCGACAGACTCATCGCTCCT | 51 | 1389 |
| 1323058 | 29447 | 29466 | N/A | N/A | CCATCATAAAATTAAATACT | 104 | 1390 |
| 1323121 | 8383 | 8402 | N/A | N/A | AACTTCATCCCTGAATAGAA | 92 | 1391 |
| 1323145 | 16875 | 16894 | N/A | N/A | TGGTAACCAAACTCAAAGTT | 65 | 1392 |
| 1323188 | 24801 | 24820 | N/A | N/A | ATTTTGTCAAAACCACTAAA | 80 | 1393 |
| 1323192 | 24389 | 24408 | N/A | N/A | ATAATCAAAACAAACTGGGC | 84 | 1394 |
| 1323255 | 4725 | 4744 | N/A | N/A | AACTATTTGCCTTACTGCCT | 84 | 1395 |
| 1323287 | 28636 | 28655 | N/A | N/A | TCCAGCCCACATAAAGTTTA | 105 | 1396 |
| 1323303 | 19793 | 19812 | N/A | N/A | ACACCCTTCCACTCTTTTTC | 76 | 1397 |
| 1323314 | 20086 | 20105 | 435 | 454 | GCAATTTAATTTCTTCATAA | 68 | 1398 |
| 1323331 | 31236 | 31255 | N/A | N/A | ATGATCTATTCCTAAGAGAA | 53 | 1399 |

TABLE 19
Reduction of IFNAR1 RNA by 5-10-5 MOE gapmers with mixed PO/PS internucleoside linkages in
A431 cells

| | SEQ ID | SEQ | SEQ ID | SEQ | | | |
|---|---|---|---|---|---|---|---|
| | NO 1 | ID NO | NO 2 | ID NO | | IFNAR1 | |
| Compound | Start | 1 Stop | Start | 2 Stop | | (% | SEQ ID |
| Number | Site | Site | Site | Site | Sequence (5' to 3') | UTC) | NO |
| 1321114 | 25701 | 25720 | N/A | N/A | TTTAGTCCTAAACCACACAA | 91 | 1400 |
| 1321132 | 30006 | 30025 | N/A | N/A | ACTTGTCCAGCAATGTGCTA | 87 | 1401 |
| 1321160 | 31676 | 31695 | N/A | N/A | CTTTCTCAATTTTTTATGTT | 39 | 1402 |
| 1321179 | 35096 | 35115 | 2368 | 2387 | ACTCATCTCATCCAATGCAA | 56 | 1403 |
| 1321255 | 25157 | 25176 | N/A | N/A | CTATTCATCTCCTACAATTT | 89 | 1404 |
| 1321279 | 26936 | 26955 | N/A | N/A | ACAAAATCCCCAAAAGCCTA | 98 | 1405 |
| 1321330 | 20076 | 20095 | 425 | 444 | TTCTTCATAAACATTCAGCT | 56 | 1406 |
| 1321338 | 5657 | 5676 | N/A | N/A | TTCAGCCAAATCCCCAAGGA | 101 | 1407 |
| 1321340 | 11816 | 11835 | N/A | N/A | ACTTGTTTTTTCTACAATTA | 98 | 1408 |
| 1321354 | 18714 | 18733 | N/A | N/A | GCTAGACTGATCTTAAACTC | 94 | 1409 |
| 1321378 | 38176 | 38195 | 5448 | 5467 | GGTTATGTCCTTCTACAATT | 45 | 1410 |
| 1321398 | 12969 | 12988 | N/A | N/A | AACTTTTTCCATCCCTTCAA | 93 | 1411 |
| 1321410 | 25989 | 26008 | N/A | N/A | ACTGACTCCTTGACTGCTTA | 81 | 1412 |
| 1321421 | 12250 | 12269 | N/A | N/A | AAACTGTATTTCTCCCTCAT | 89 | 1413 |
| 1321464 | 38620 | 38639 | 5892 | 5911 | TTGGAACGAACTAATCCTGA | 106 | 1414 |
| 1321525 | 24917 | 24936 | N/A | N/A | AGTTCTCTTTCATTTATGCA | 58 | 1415 |
| 1321527 | 34506 | 34525 | 1778 | 1797 | TTCACTTGTTTTACTTTCGC | 21 | 1416 |
| 1321535 | 8657 | 8676 | N/A | N/A | TCAGCTTTTAAATTCATTTA | 103 | 1417 |
| 1321546 | 9425 | 9444 | N/A | N/A | GTACAGTGACTTTCTAATTT | 59 | 1418 |
| 1321567 | 33686 | 33705 | N/A | N/A | TTGCTCAAATTCACAAAACC | 92 | 1419 |
| 1321656 | 11379 | 11398 | N/A | N/A | GATAAAGTCTTTTATTAGCA | 89 | 1420 |
| 1321688 | 27212 | 27231 | N/A | N/A | AACATGCGCCAGCATACCAA | 129 | 1421 |
| 1321693 | 13832 | 13851 | N/A | N/A | CTGGTGATATCACCCTGGAT | 103 | 1422 |
| 1321726 | 29446 | 29465 | N/A | N/A | CATCATAAAATTAAATACTA | 111 | 1423 |
| 1321739 | 27440 | 27459 | N/A | N/A | TCATCTTGTCCTAATTATTT | 56 | 1424 |
| 1321807 | 21010 | 21029 | N/A | N/A | AAAGTTTTCAATCCATTTTA | 67 | 1425 |
| 1321818 | 36289 | 36308 | 3561 | 3580 | GCCTTCAACCTTTTCTTCCA | 77 | 1426 |
| 1321822 | 37266 | 37285 | 4538 | 4557 | AGCTAAGCATATACTGATAA | 76 | 1427 |
| 1321829 | 30994 | 31013 | N/A | N/A | CTATCGCCAGAATAATGTCT | 67 | 1428 |
| 1321831 | 16296 | 16315 | N/A | N/A | GGAAGAGACATCAACACTCC | 69 | 1429 |
| 1321844 | 35720 | 35739 | 2992 | 3011 | GTCCCAAGACTTCTTGCATA | 75 | 1430 |
| 1321883 | 30379 | 30398 | N/A | N/A | CCTCTAATCCTCCTTGGACC | 104 | 1431 |
| 1321900 | 31226 | 31245 | N/A | N/A | CCTAAGAGAATTCTAATTGA | 85 | 1432 |
| 1321919 | 25206 | 25225 | N/A | N/A | TCCCCATAACCCATTTTTCC | 112 | 1433 |
| 1321933 | 24799 | 24818 | N/A | N/A | TTTGTCAAAACCACTAAAGT | 78 | 1434 |
| 1321944 | 25766 | 25785 | N/A | N/A | CTCTTTAGCCCCTATTCACC | 73 | 1435 |
| 1321974 | 29052 | 29071 | N/A | N/A | GATTCAGTAACAATAGGCTC | 38 | 1436 |
| 1322124 | 22218 | 22237 | N/A | N/A | ACTTTATTAATACAATGCCA | 105 | 1437 |
| 1322142 | 6033 | 6052 | N/A | N/A | ATATGGTTTCCTAAGCCAAC | 95 | 1438 |
| 1322176 | 24313 | 24332 | 888 | 907 | TTGCATATGTATAATCCCAT | 1 | 132 |
| 1322188 | 18056 | 18075 | N/A | N/A | GCTACTTTTATATTTTCTTA | 62 | 1439 |
| 1322193 | 34160 | 34179 | N/A | N/A | CTAAGAACATACTAATTGCC | 89 | 1440 |
| 1322283 | 28627 | 28646 | N/A | N/A | CATAAAGTTTAAAAATTTCC | 112 | 1441 |
| 1322288 | 33439 | 33458 | N/A | N/A | TGCTCCTAACTTACAATGGA | 80 | 1442 |
| 1322316 | 37531 | 37550 | 4803 | 4822 | GTGCAGGTACATATATGAAT | 33 | 1443 |
| 1322337 | 14583 | 14602 | 283 | 302 | CTCCTGTTCCACCTCAGGAT | 93 | 1444 |
| 1322353 | 29822 | 29841 | N/A | N/A | AGGTTTGTCTGATCTACAGA | 53 | 1445 |
| 1322354 | 29509 | 29528 | N/A | N/A | CCCTTTTTTCATTACCTCCC | 75 | 1446 |
| 1322388 | 35987 | 36006 | 3259 | 3278 | CATTTTTCCCCCTCAGTTCA | 91 | 1447 |
| 1322486 | 28557 | 28576 | N/A | N/A | AAGTTACAAAATTATACTAT | 103 | 1448 |
| 1322497 | 22453 | 22472 | N/A | N/A | GCCTAATTTTTCTCTCACAT | 25 | 1449 |
| 1322517 | 8939 | 8958 | N/A | N/A | TGCCAGTACAATTCTTGTCT | 82 | 1450 |
| 1322555 | 25556 | 25575 | N/A | N/A | CAGAAATACCTCTCATTATC | 82 | 1451 |
| 1322596 | 31816 | 31835 | 1349 | 1368 | TCTGGCTTTCACACAATATA | 45 | 1452 |
| 1322607 | 32662 | 32681 | 1466 | 1485 | TGCAATACAAATTCCAACTA | 42 | 1453 |
| 1322649 | 16873 | 16892 | N/A | N/A | GTAACCAAACTCAAAGTTCA | 77 | 1454 |
| 1322696 | 19786 | 19805 | N/A | N/A | TCCACTCTTTTTCAATGCAT | 63 | 1455 |
| 1322726 | 25265 | 25284 | N/A | N/A | TGCCTTTGCTCTCTCTACTC | 79 | 1456 |
| 1322835 | 28285 | 28304 | N/A | N/A | AACTACTGCCTTACCTTGTA | 103 | 1457 |
| 1322874 | 24388 | 24407 | N/A | N/A | TAATCAAAACAAACTGGGCA | 77 | 1458 |
| 1322888 | 25391 | 25410 | N/A | N/A | CTTGGTTCAAAATTAACACT | 39 | 1459 |
| 1322898 | 23462 | 23481 | N/A | N/A | ACTTCACTTTAAACCCTTCC | 88 | 1460 |
| 1322961 | 7569 | 7588 | N/A | N/A | CTGAGATAACTTTCAGGATC | 93 | 1461 |
| 1322992 | 7831 | 7850 | N/A | N/A | TGGACATTTAATCTAATATA | 88 | 1462 |
| 1323000 | 9805 | 9824 | N/A | N/A | CTTGTTTATCTCCTTGCCAT | 96 | 1463 |
| 1323061 | 4957 | 4976 | N/A | N/A | GGACCTCTCCTCTCAACAAA | 87 | 1464 |
| 1323101 | 20416 | 20435 | N/A | N/A | ACTAAGTCTTAGATTTGTCA | 44 | 1465 |
| 1323106 | 27978 | 27997 | N/A | N/A | ATAGTATCCACACTCAGGAA | 58 | 1466 |
| 1323109 | 35516 | 35535 | 2788 | 2807 | CCTGGCTTTAATCCTAAACC | 89 | 1467 |
| 1323200 | 8369 | 8388 | N/A | N/A | ATAGAATACATCACATCCCC | 84 | 1468 |
| 1323209 | 26752 | 26771 | N/A | N/A | CACATCCTGTATAATCCCCT | 57 | 1469 |
| 1323223 | 18312 | 18331 | N/A | N/A | ACTTTTACATATCTGAGGCC | 80 | 1470 |
| 1323229 | 4724 | 4743 | N/A | N/A | ACTATTTGCCTTACTGCCTT | 90 | 1471 |
| 1323243 | 27014 | 27033 | N/A | N/A | TTAGTCCACTCTCCCACATA | 94 | 1472 |
| 1323271 | 6734 | 6753 | N/A | N/A | GGCCAGGACCTCTTGAGGCT | 106 | 1473 |
| 1323297 | 13568 | 13587 | N/A | N/A | TCAGGACTTCCTTAAGCATT | 78 | 1474 |
| 1323306 | 30132 | 30151 | N/A | N/A | TTCATGTACAATACTTAGCA | 44 | 1475 |
| 1323334 | 22675 | 22694 | N/A | N/A | ACAAAACATCTTCCTTACCT | 96 | 1476 |

TABLE 20
Reduction of IFNAR1 RNA by 5-10-5 MOE gapmers with mixed PO/PS internucleoside linkages in
A431 cells

| | SEQ ID | SEQ | SEQ ID | SEQ | | | |
|---|---|---|---|---|---|---|---|
| | NO 1 | ID NO | NO 2 | ID NO | | IFNAR1 | |
| Compound | Start | 1 Stop | Start | 2 Stop | | (% | SEQ ID |
| Number | Site | Site | Site | Site | Sequence (5' to 3') | UTC) | NO |
| 1320893 | 31815 | 31834 | 1348 | 1367 | CTGGCTTTCACACAATATAC | 59 | 1477 |
| 1320996 | 36288 | 36307 | 3560 | 3579 | CCTTCAACCTTTTCTTCCAC | 81 | 1478 |
| 1321026 | 30131 | 30150 | N/A | N/A | TCATGTACAATACTTAGCAT | 60 | 1479 |
| 1321061 | 9748 | 9767 | N/A | N/A | AATCCTGGCATTTCCTCCCA | 93 | 1480 |
| 1321107 | 25554 | 25573 | N/A | N/A | GAAATACCTCTCATTATCTA | 110 | 1481 |
| 1321190 | 30378 | 30397 | N/A | N/A | CTCTAATCCTCCTTGGACCA | 106 | 1482 |
| 1321209 | 24371 | 24390 | N/A | N/A | GCAAAAGGAAATTTATGGAA | 103 | 1483 |
| 1321232 | 29819 | 29838 | N/A | N/A | TTTGTCTGATCTACAGACAT | 127 | 1484 |
| 1321261 | 23374 | 23393 | N/A | N/A | CTTGACCTTAATTATTGGAA | 61 | 1485 |
| 1321262 | 12248 | 12267 | N/A | N/A | ACTGTATTTCTCCCTCATTC | 98 | 1486 |
| 1321329 | 28274 | 28293 | N/A | N/A | TACCTTGTATTTCAGTATCA | 91 | 1487 |
| 1321355 | 4952 | 4971 | N/A | N/A | TCTCCTCTCAACAAATGGCA | 103 | 1488 |
| 1321369 | 35914 | 35933 | 3186 | 3205 | GCTAGACGAGAAGCCAGCCT | 115 | 1489 |
| 1321372 | 33685 | 33704 | N/A | N/A | TGCTCAAATTCACAAAACCC | 109 | 1490 |
| 1321406 | 25765 | 25784 | N/A | N/A | TCTTTAGCCCCTATTCACCT | 106 | 1491 |
| 1321493 | 13830 | 13849 | N/A | N/A | GGTGATATCACCCTGGATCA | 141 | 1492 |
| 1321499 | 29051 | 29070 | N/A | N/A | ATTCAGTAACAATAGGCTCA | 56 | 1493 |
| 1321510 | 8368 | 8387 | N/A | N/A | TAGAATACATCACATCCCCT | 100 | 1494 |
| 1321526 | 16705 | 16724 | N/A | N/A | ATGTATGTATACACAATGTG | 81 | 1495 |
| | 16730 | 16749 | | | | | |
| 1321578 | 18282 | 18301 | N/A | N/A | GCTGGCATTAAAAATACCTT | 91 | 1496 |
| 1321611 | 27208 | 27227 | N/A | N/A | TGCGCCAGCATACCAATGGA | 88 | 1497 |
| 1321660 | 25700 | 25719 | N/A | N/A | TTAGTCCTAAACCACACAAC | 118 | 1498 |
| 1321662 | 29508 | 29527 | N/A | N/A | CCTTTTTTCATTACCTCCCC | 83 | 1499 |
| 1321700 | 30002 | 30021 | N/A | N/A | GTCCAGCAATGTGCTAGGTA | 53 | 1500 |
| 1321763 | 5653 | 5672 | N/A | N/A | GCCAAATCCCCAAGGAAGGA | 100 | 1501 |
| 1321781 | 13567 | 13586 | N/A | N/A | CAGGACTTCCTTAAGCATTT | 102 | 1502 |
| 1321812 | 34505 | 34524 | 1777 | 1796 | TCACTTGTTTTACTTTCGCT | 36 | 1503 |
| 1321951 | 7806 | 7825 | N/A | N/A | AATGCATTTATAATTTTGGT | 99 | 1504 |
| 1321964 | 35719 | 35738 | 2991 | 3010 | TCCCAAGACTTCTTGCATAC | 60 | 1505 |
| 1321987 | 26748 | 26767 | N/A | N/A | TCCTGTATAATCCCCTCCTC | 94 | 1506 |
| 1321988 | 9423 | 9442 | N/A | N/A | ACAGTGACTTTCTAATTTTC | 78 | 1507 |
| 1322020 | 6028 | 6047 | N/A | N/A | GTTTCCTAAGCCAACAGGTA | 75 | 1508 |
| 1322032 | 31674 | 31693 | N/A | N/A | TTCTCAATTTTTTATGTTCA | 34 | 1509 |
| 1322060 | 25968 | 25987 | N/A | N/A | CAGAAGAGCCAGCTAAGCCA | 136 | 1510 |
| 1322062 | 16295 | 16314 | N/A | N/A | GAAGAGACATCAACACTCCA | 107 | 1511 |
| 1322126 | 37530 | 37549 | 4802 | 4821 | TGCAGGTACATATATGAATA | 52 | 1512 |
| 1322176 | 24313 | 24332 | 888 | 907 | TTGCATATGTATAATCCCAT | 19 | 132 |
| 1322196 | 27977 | 27996 | N/A | N/A | TAGTATCCACACTCAGGAAA | 120 | 1513 |
| 1322204 | 22673 | 22692 | N/A | N/A | AAAACATCTTCCTTACCTGT | 112 | 1514 |
| 1322218 | 6710 | 6729 | N/A | N/A | CATGAATGCATCCTTAACCT | 89 | 1515 |
| 1322230 | 35069 | 35088 | 2341 | 2360 | GACAGGCTTTTTCATGATTT | 52 | 1516 |
| 1322243 | 34159 | 34178 | N/A | N/A | TAAGAACATACTAATTGCCT | 95 | 1517 |
| 1322249 | 22217 | 22236 | N/A | N/A | CTTTATTAATACAATGCCAA | 115 | 1518 |
| 1322286 | 4717 | 4736 | N/A | N/A | GCCTTACTGCCTTCCTGCCC | 92 | 1519 |
| 1322304 | 29391 | 29410 | N/A | N/A | GAAGAATGCTTTCCAATGGT | 48 | 1520 |
| 1322313 | 25264 | 25283 | N/A | N/A | GCCTTTGCTCTCTCTACTCC | 108 | 1521 |
| 1322351 | 28556 | 28575 | N/A | N/A | AGTTACAAAATTATACTATA | 105 | 1522 |
| 1322365 | 20075 | 20094 | 424 | 443 | TCTTCATAAACATTCAGCTT | 94 | 1523 |
| 1322369 | 20390 | 20409 | N/A | N/A | TAGCTTTGTCTTTACAGCCC | 110 | 1524 |
| 1322370 | 27013 | 27032 | N/A | N/A | TAGTCCACTCTCCCACATAC | 98 | 1525 |
| 1322382 | 24915 | 24934 | N/A | N/A | TTCTCTTTCATTTATGCAGC | 33 | 1526 |
| 1322450 | 17708 | 17727 | N/A | N/A | TCATATGCAATAATTAGCTC | 61 | 1527 |
| 1322480 | 38175 | 38194 | 5447 | 5466 | GTTATGTCCTTCTACAATTC | 63 | 1528 |
| 1322496 | 20999 | 21018 | N/A | N/A | TCCATTTTAACTAATTAATC | 135 | 1529 |
| 1322506 | 8938 | 8957 | N/A | N/A | GCCAGTACAATTCTTGTCTA | 66 | 1530 |
| 1322576 | 25155 | 25174 | N/A | N/A | ATTCATCTCCTACAATTTTC | 108 | 1531 |
| 1322615 | 38583 | 38602 | 5855 | 5874 | AAGGGCAAACAGTTTAGTTC | 87 | 1532 |
| 1322620 | 26930 | 26949 | N/A | N/A | TCCCCAAAAGCCTACAGGAC | 121 | 1533 |
| 1322682 | 35515 | 35534 | 2787 | 2806 | CTGGCTTTAATCCTAAACCA | 122 | 1534 |
| 1322762 | 12968 | 12987 | N/A | N/A | ACTTTTTCCATCCCTTCAAT | 89 | 1535 |
| 1322767 | 32661 | 32680 | 1465 | 1484 | GCAATACAAATTCCAACTAT | 46 | 1536 |
| 1322788 | 25205 | 25224 | N/A | N/A | CCCCATAACCCATTTTTCCT | 126 | 1537 |
| 1322820 | 11812 | 11831 | N/A | N/A | GTTTTTTCTACAATTAAGTA | 80 | 1538 |
| 1322834 | 37241 | 37260 | 4513 | 4532 | CATGTAGAACATAATGCAGA | 86 | 1539 |
| 1322853 | 11378 | 11397 | N/A | N/A | ATAAAGTCTTTTATTAGCAG | 112 | 1540 |
| 1322892 | 8656 | 8675 | N/A | N/A | CAGCTTTTAAATTCATTTAT | 131 | 1541 |
| 1322894 | 18628 | 18647 | N/A | N/A | GCCCGGCCAATTTAGCAGAT | 116 | 1542 |
| 1322917 | 14582 | 14601 | 282 | 301 | TCCTGTTCCACCTCAGGATA | 144 | 1543 |
| 1322921 | 33438 | 33457 | N/A | N/A | GCTCCTAACTTACAATGGAA | 72 | 1544 |
| 1322936 | 24798 | 24817 | N/A | N/A | TTGTCAAAACCACTAAAGTA | 91 | 1545 |
| 1323054 | 27439 | 27458 | N/A | N/A | CATCTTGTCCTAATTATTTT | 88 | 1546 |
| 1323065 | 25390 | 25409 | N/A | N/A | TTGGTTCAAAATTAACACTA | 72 | 1547 |
| 1323067 | 22452 | 22471 | N/A | N/A | CCTAATTTTTCTCTCACATC | 81 | 1548 |
| 1323175 | 31224 | 31243 | N/A | N/A | TAAGAGAATTCTAATTGATT | 124 | 1549 |
| 1323215 | 30992 | 31011 | N/A | N/A | ATCGCCAGAATAATGTCTAA | 59 | 1550 |
| 1323252 | 28626 | 28645 | N/A | N/A | ATAAAGTTTAAAAATTTCCC | 132 | 1551 |
| 1323261 | 7545 | 7564 | N/A | N/A | TGAGCTGTAAACTTAAGGTC | 85 | 1552 |
| 1323295 | 19785 | 19804 | N/A | N/A | CCACTCTTTTTCAATGCATA | 52 | 1553 |

TABLE 21
Reduction of IFNAR1 RNA by 5-10-5 MOE gapmers with mixed PO/PS internucleoside linkages in
A431 cells

| | SEQ ID | SEQ | SEQ ID | SEQ | | | |
|---|---|---|---|---|---|---|---|
| | NO 1 | ID NO | NO 2 | ID NO | | IFNAR1 | |
| Compound | Start | 1 Stop | Start | 2 Stop | | (% | SEQ ID |
| Number | Site | Site | Site | Site | Sequence (5' to 3') | UTC) | NO |
| 1320887 | 13557 | 13576 | N/A | N/A | TTAAGCATTTCTCGCAGGGC | 85 | 1554 |
| 1320947 | 31660 | 31679 | N/A | N/A | TGTTCAGTCTAACATTGGCC | 38 | 1555 |
| 1320999 | 17660 | 17679 | N/A | N/A | ACTAATGTAATATTTACTTC | 93 | 1556 |
| 1321025 | 18611 | 18630 | N/A | N/A | GATTTGAGAACTTTTACCTA | 76 | 1557 |
| 1321031 | 5637 | 5656 | N/A | N/A | AGGATAAAAAGACTCAGCCA | 87 | 1558 |
| 1321041 | 13820 | 13839 | N/A | N/A | CCCTGGATCACCACCTGGGT | 106 | 1559 |
| 1321055 | 24370 | 24389 | N/A | N/A | CAAAAGGAAATTTATGGAAT | 107 | 1560 |
| 1321128 | N/A | N/A | 1119 | 1138 | AAGCTTGTATTTCAGTATCA | 39 | 1561 |
| 1321138 | 30351 | 30370 | N/A | N/A | TGTGGAATACATTTTATTCC | 86 | 1562 |
| 1321150 | 22669 | 22688 | N/A | N/A | CATCTTCCTTACCTGTGGTC | 82 | 1563 |
| 1321154 | 8366 | 8385 | N/A | N/A | GAATACATCACATCCCCTTA | 85 | 1564 |
| 1321219 | 22447 | 22466 | N/A | N/A | TTTTTCTCTCACATCGATTA | 99 | 1565 |
| 1321225 | 33684 | 33703 | N/A | N/A | GCTCAAATTCACAAAACCCA | 65 | 1566 |
| 1321289 | 16703 | 16722 | N/A | N/A | GTATGTATACACAATGTGTG | 94 | 1567 |
| | 16728 | 16747 | | | | | |
| 1321339 | 34494 | 34513 | 1766 | 1785 | ACTTTCGCTTTCATCTTCAT | 54 | 1568 |
| 1321341 | 6672 | 6691 | N/A | N/A | AAGTTGATTTCAGACCGGTC | 91 | 1569 |
| 1321361 | 4942 | 4961 | N/A | N/A | ACAAATGGCATTCCAAAGTT | 72 | 1570 |
| 1321375 | 25699 | 25718 | N/A | N/A | TAGTCCTAAACCACACAACA | 76 | 1571 |
| 1321396 | 12577 | 12596 | N/A | N/A | AAGTATGGAATTTAATCCAT | 95 | 1572 |
| 1321407 | 19778 | 19797 | N/A | N/A | TTTTCAATGCATATAAGCCA | 47 | 1573 |
| 1321411 | 12247 | 12266 | N/A | N/A | CTGTATTTCTCCCTCATTCC | 78 | 1574 |
| 1321470 | 29507 | 29526 | N/A | N/A | CTTTTTTCATTACCTCCCCA | 79 | 1575 |
| 1321474 | 8857 | 8876 | N/A | N/A | GTATTTGTAAAAACTGCTTC | 72 | 1576 |
| 1321566 | 27011 | 27030 | N/A | N/A | GTCCACTCTCCCACATACCA | 69 | 1577 |
| 1321568 | 11288 | 11307 | N/A | N/A | CAGCTGCTTTACCTGTGTTC | 92 | 1578 |
| 1321597 | 29370 | 29389 | N/A | N/A | TTGGAGGAAAACAAACAACT | 68 | 1579 |
| 1321602 | 25389 | 25408 | N/A | N/A | TGGTTCAAAATTAACACTAA | 95 | 1580 |
| 1321613 | 20996 | 21015 | N/A | N/A | ATTTTAACTAATTAATCCAT | 103 | 1581 |
| 1321661 | 25263 | 25282 | N/A | N/A | CCTTTGCTCTCTCTACTCCT | 62 | 1582 |
| 1321755 | 25154 | 25173 | N/A | N/A | TTCATCTCCTACAATTTTCC | 63 | 1583 |
| 1321759 | 26742 | 26761 | N/A | N/A | ATAATCCCCTCCTCTTGAGC | 66 | 1584 |
| 1321785 | 35712 | 35731 | 2984 | 3003 | ACTTCTTGCATACACTATCT | 47 | 1585 |
| 1321794 | 8653 | 8672 | N/A | N/A | CTTTTAAATTCATTTATGGT | 77 | 1586 |
| 1321798 | 18281 | 18300 | N/A | N/A | CTGGCATTAAAAATACCTTA | 78 | 1587 |
| 1321837 | 34158 | 34177 | N/A | N/A | AAGAACATACTAATTGCCTT | 69 | 1588 |
| 1321840 | 7543 | 7562 | N/A | N/A | AGCTGTAAACTTAAGGTCTT | 70 | 1589 |
| 1321909 | 30130 | 30149 | N/A | N/A | CATGTACAATACTTAGCATA | 74 | 1590 |
| 1321947 | 20389 | 20408 | N/A | N/A | AGCTTTGTCTTTACAGCCCC | 75 | 1591 |
| 1321971 | 37224 | 37243 | 4496 | 4515 | AGAGTGGAATGCAACTGCCT | 64 | 1592 |
| 1322010 | 24913 | 24932 | N/A | N/A | CTCTTTCATTTATGCAGCGC | 35 | 1593 |
| 1322065 | 14549 | 14568 | 249 | 268 | TGATGTCGACCTCTACTTTT | 55 | 1594 |
| 1322121 | 29811 | 29830 | N/A | N/A | ATCTACAGACATCTGAAAAC | 102 | 1595 |
| 1322147 | 28555 | 28574 | N/A | N/A | GTTACAAAATTATACTATAC | 91 | 1596 |
| 1322156 | 11799 | 11818 | N/A | N/A | TTAAGTAATATCAAATGGTA | 88 | 1597 |
| 1322176 | 24313 | 24332 | 888 | 907 | TTGCATATGTATAATCCCAT | 2 | 132 |
| 1322179 | 22207 | 22226 | N/A | N/A | ACAATGCCAAAACCTTCATT | 85 | 1598 |
| 1322223 | 9422 | 9441 | N/A | N/A | CAGTGACTTTCTAATTTTCC | 66 | 1599 |
| 1322235 | 25551 | 25570 | N/A | N/A | ATACCTCTCATTATCTATTT | 54 | 1600 |
| 1322268 | 35514 | 35533 | 2786 | 2805 | TGGCTTTAATCCTAAACCAT | 86 | 1601 |
| 1322275 | 38172 | 38191 | 5444 | 5463 | ATGTCCTTCTACAATTCAGT | 49 | 1602 |
| 1322448 | 4716 | 4735 | N/A | N/A | CCTTACTGCCTTCCTGCCCC | 98 | 1603 |
| 1322460 | 20038 | 20057 | 387 | 406 | ATTTGGTACTAGTAATATTC | 38 | 1604 |
| 1322463 | 35059 | 35078 | 2331 | 2350 | TTCATGATTTTACACATGGA | 66 | 1605 |
| 1322523 | 27438 | 27457 | N/A | N/A | ATCTTGTCCTAATTATTTTA | 51 | 1606 |
| 1322536 | 5985 | 6004 | N/A | N/A | GCTCACAGACCACCTGGACT | 88 | 1607 |
| 1322579 | 27966 | 27985 | N/A | N/A | CTCAGGAAACTCACAAACAA | 89 | 1608 |
| 1322589 | 9744 | 9763 | N/A | N/A | CTGGCATTTCCTCCCATTCT | 85 | 1609 |
| 1322600 | 33437 | 33456 | N/A | N/A | CTCCTAACTTACAATGGAAT | 92 | 1610 |
| 1322609 | 35882 | 35901 | 3154 | 3173 | GACAGAGACCACCCATAACA | 64 | 1611 |
| 1322613 | 37529 | 37548 | 4801 | 4820 | GCAGGTACATATATGAATAT | 36 | 1612 |
| 1322680 | 24797 | 24816 | N/A | N/A | TGTCAAAACCACTAAAGTAA | 55 | 1613 |
| 1322759 | 7805 | 7824 | N/A | N/A | ATGCATTTATAATTTTGGTT | 81 | 1614 |
| 1322773 | 28625 | 28644 | N/A | N/A | TAAAGTTTAAAAATTTCCCC | 113 | 1615 |
| 1322790 | 31222 | 31241 | N/A | N/A | AGAGAATTCTAATTGATTTA | 95 | 1616 |
| 1322798 | 25949 | 25968 | N/A | N/A | ACGCTTGGACTCCTGACTCA | 52 | 1617 |
| 1322803 | 30985 | 31004 | N/A | N/A | GAATAATGTCTAACAAGCCG | 32 | 1618 |
| 1322855 | 25204 | 25223 | N/A | N/A | CCCATAACCCATTTTTCCTT | 74 | 1619 |
| 1322858 | 16293 | 16312 | N/A | N/A | AGAGACATCAACACTCCAGA | 44 | 1620 |
| 1322877 | 29029 | 29048 | N/A | N/A | AATCTGTATTTTAAAAGCAA | 103 | 1621 |
| 1322946 | 38557 | 38576 | 5829 | 5848 | GCAAGGCTATGCAATACCAC | 61 | 1622 |
| 1322954 | 27207 | 27226 | N/A | N/A | GCGCCAGCATACCAATGGAC | 95 | 1623 |
| 1323008 | 23336 | 23355 | N/A | N/A | CAGGATACTTTCATATTTTA | 18 | 1624 |
| 1323127 | 29989 | 30008 | N/A | N/A | CTAGGTATTTTCATATTTGT | 21 | 1625 |
| 1323217 | 31814 | 31833 | 1347 | 1366 | TGGCTTTCACACAATATACA | 41 | 1626 |
| 1323232 | 25764 | 25783 | N/A | N/A | CTTTAGCCCCTATTCACCTT | 69 | 1627 |
| 1323234 | 26925 | 26944 | N/A | N/A | AAAAGCCTACAGGACAGCCT | 58 | 1628 |
| 1323237 | 36287 | 36306 | 3559 | 3578 | CTTCAACCTTTTCTTCCACC | 43 | 1629 |
| 1323308 | 32554 | 32573 | N/A | N/A | GCTGTGTGAAAGACTAGCCA | 97 | 1630 |

TABLE 22
Reduction of IFNAR1 RNA by 5-10-5 MOE gapmers with mixed PO/PS internucleoside linkages in
A431 cells

| | SEQ ID | SEQ | SEQ ID | SEQ | | | |
|---|---|---|---|---|---|---|---|
| | NO 1 | ID NO | NO 2 | ID NO | | IFNAR1 | |
| Compound | Start | 1 Stop | Start | 2 Stop | | (% | SEQ ID |
| Number | Site | Site | Site | Site | Sequence (5' to 3') | UTC) | NO |
| 1320897 | 25923 | 25942 | N/A | N/A | CTTTGAGACAATAAACAGCT | 53 | 1631 |
| 1320958 | 7528 | 7547 | N/A | N/A | GTCTTGAGTTTTCAACATGA | 39 | 1632 |
| 1320969 | 27965 | 27984 | N/A | N/A | TCAGGAAACTCACAAACAAT | 91 | 1633 |
| 1321007 | 24796 | 24815 | N/A | N/A | GTCAAAACCACTAAAGTAAT | 58 | 1634 |
| 1321091 | 16702 | 16721 | N/A | N/A | TATGTATACACAATGTGTGT | 86 | 1635 |
| | 16727 | 16746 | | | | | |
| 1321116 | 20658 | 20677 | N/A | N/A | ACAATGATAAACCTATTTTA | 87 | 1636 |
| 1321126 | 38553 | 38572 | 5825 | 5844 | GGCTATGCAATACCACAGCA | 82 | 1637 |
| 1321158 | 16292 | 16311 | N/A | N/A | GAGACATCAACACTCCAGAA | 42 | 1638 |
| 1321168 | 11752 | 11771 | N/A | N/A | CTGCTTTACCAAGTCTGTTA | 96 | 1639 |
| 1321173 | 24355 | 24374 | N/A | N/A | GGAATGGAACTTACTGGAGC | 55† | 1640 |
| 1321194 | 26740 | 26759 | N/A | N/A | AATCCCCTCCTCTTGAGCAT | 59 | 1641 |
| 1321237 | 25763 | 25782 | N/A | N/A | TTTAGCCCCTATTCACCTTT | 74 | 1642 |
| 1321301 | 22657 | 22676 | 801 | 820 | CTGTGGTCTTTATACAATGT | 33 | 1643 |
| 1321308 | 35711 | 35730 | 2983 | 3002 | CTTCTTGCATACACTATCTT | 74 | 1644 |
| 1321373 | 35058 | 35077 | 2330 | 2349 | TCATGATTTTACACATGGAA | 38 | 1645 |
| 1321418 | 18608 | 18627 | N/A | N/A | TTGAGAACTTTTACCTATGT | 47 | 1646 |
| 1321536 | 13532 | 13551 | N/A | N/A | TAGCGGTAATGAACTCCCTT | 76 | 1647 |
| 1321544 | 5984 | 6003 | N/A | N/A | CTCACAGACCACCTGGACTC | 91 | 1648 |
| 1321549 | 30866 | 30885 | N/A | N/A | GTCTGTACAAGAAATTTCAA | 67 | 1649 |
| 1321550 | 12245 | 12264 | N/A | N/A | GTATTTCTCCCTCATTCCTG | 90 | 1650 |
| 1321590 | 31659 | 31678 | N/A | N/A | GTTCAGTCTAACATTGGCCT | 57 | 1651 |
| 1321615 | 6482 | 6501 | N/A | N/A | GGACTGGCCTATACAGCCTC | 102 | 1652 |
| 1321630 | 35881 | 35900 | 3153 | 3172 | ACAGAGACCACCCATAACAA | 77 | 1653 |
| 1321711 | 36286 | 36305 | 3558 | 3577 | TTCAACCTTTTCTTCCACCA | 43 | 1654 |
| 1321766 | 37213 | 37232 | 4485 | 4504 | CAACTGCCTTTTCATGTCTA | 45 | 1655 |
| 1321776 | 33683 | 33702 | N/A | N/A | CTCAAATTCACAAAACCCAC | 84 | 1656 |
| 1321779 | 20033 | 20052 | 382 | 401 | GTACTAGTAATATTCTGACA | 38 | 1657 |
| 1321800 | 25262 | 25281 | N/A | N/A | CTTTGCTCTCTCTACTCCTC | 56 | 1658 |
| 1321845 | 38171 | 38190 | 5443 | 5462 | TGTCCTTCTACAATTCAGTA | 54 | 1659 |
| 1321861 | 24894 | 24913 | N/A | N/A | CCTGGACTTCATCCATGTTT | 86 | 1660 |
| 1321888 | 32480 | 32499 | N/A | N/A | GCACTGAGTCCACAGCAACC | 69 | 1661 |
| 1321889 | 8836 | 8855 | N/A | N/A | TTGTGTTAAACATAAATCTC | 90 | 1662 |
| 1321897 | 26905 | 26924 | N/A | N/A | GAGGTTGACCCTAATCTTGT | 82 | 1663 |
| 1321908 | 27437 | 27456 | N/A | N/A | TCTTGTCCTAATTATTTTAC | 58 | 1664 |
| 1321925 | 28263 | 28282 | 1108 | 1127 | TCAGTATCAAACTTTATCTC | 66 | 1665 |
| 1321932 | 7790 | 7809 | N/A | N/A | TGGTTGCTTTCAACCTTTCA | 97 | 1666 |
| 1321963 | 12576 | 12595 | N/A | N/A | AGTATGGAATTTAATCCATT | 93 | 1667 |
| 1321984 | 8652 | 8671 | N/A | N/A | TTTTAAATTCATTTATGGTT | 98 | 1668 |
| 1321985 | 22206 | 22225 | N/A | N/A | CAATGCCAAAACCTTCATTC | 85 | 1669 |
| 1321996 | 25698 | 25717 | N/A | N/A | AGTCCTAAACCACACAACAC | 83 | 1670 |
| 1322021 | 11175 | 11194 | N/A | N/A | TTTTAGGATCCTCCTATTCT | 97 | 1671 |
| 1322052 | 9743 | 9762 | N/A | N/A | TGGCATTTCCTCCCATTCTC | 148 | 1672 |
| 1322053 | 22446 | 22465 | N/A | N/A | TTTTCTCTCACATCGATTAA | 85 | 1673 |
| 1322090 | 33435 | 33454 | N/A | N/A | CCTAACTTACAATGGAATTA | 78 | 1674 |
| 1322122 | 25388 | 25407 | N/A | N/A | GGTTCAAAATTAACACTAAA | 44 | 1675 |
| 1322176 | 24313 | 24332 | 888 | 907 | TTGCATATGTATAATCCCAT | 1 | 132 |
| 1322213 | 14521 | 14540 | N/A | N/A | TTTTAGATTTTTTCCACCTA | 62 | 1676 |
| 1322252 | 29988 | 30007 | N/A | N/A | TAGGTATTTTCATATTTGTT | 17 | 1677 |
| 1322327 | 29028 | 29047 | N/A | N/A | ATCTGTATTTTAAAAGCAAA | 104 | 1678 |
| 1322341 | 34157 | 34176 | N/A | N/A | AGAACATACTAATTGCCTTA | 50 | 1679 |
| 1322376 | 29368 | 29387 | N/A | N/A | GGAGGAAAACAAACAACTGT | 58 | 1680 |
| 1322435 | 9421 | 9440 | N/A | N/A | AGTGACTTTCTAATTTTCCC | 63 | 1681 |
| 1322532 | 25550 | 25569 | N/A | N/A | TACCTCTCATTATCTATTTG | 52 | 1682 |
| 1322540 | 30115 | 30134 | N/A | N/A | GCATAGTACCTTACATATAA | 8 | 1683 |
| 1322554 | 28554 | 28573 | N/A | N/A | TTACAAAATTATACTATACA | 107 | 1684 |
| 1322590 | 31813 | 31832 | 1346 | 1365 | GGCTTTCACACAATATACAG | 39 | 1685 |
| 1322632 | 29506 | 29525 | N/A | N/A | TTTTTTCATTACCTCCCCAA | 69 | 1686 |
| 1322647 | 20388 | 20407 | N/A | N/A | GCTTTGTCTTTACAGCCCCC | 57 | 1687 |
| 1322659 | 17659 | 17678 | N/A | N/A | CTAATGTAATATTTACTTCA | 79 | 1688 |
| 1322776 | 29807 | 29826 | N/A | N/A | ACAGACATCTGAAAACCGAC | 68 | 1689 |
| 1322813 | 31215 | 31234 | N/A | N/A | TCTAATTGATTTACAAGTAC | 50 | 1690 |
| 1322836 | 19763 | 19782 | N/A | N/A | AGCCAAGTTATTACTTATGA | 32 | 1691 |
| 1322912 | 30350 | 30369 | N/A | N/A | GTGGAATACATTTTATTCCT | 98 | 1692 |
| 1322928 | 34493 | 34512 | 1765 | 1784 | CTTTCGCTTTCATCTTCATT | 59 | 1693 |
| 1322998 | 18279 | 18298 | N/A | N/A | GGCATTAAAAATACCTTAAA | 59 | 1694 |
| 1323030 | 37483 | 37502 | 4755 | 4774 | ACACAGGTACATATTATATA | 51 | 1695 |
| 1323066 | 35512 | 35531 | 2784 | 2803 | GCTTTAATCCTAAACCATGT | 60 | 1696 |
| 1323081 | 23330 | 23349 | N/A | N/A | ACTTTCATATTTTAACATTC | 39 | 1697 |
| 1323120 | 25153 | 25172 | N/A | N/A | TCATCTCCTACAATTTTCCA | 66 | 1698 |
| 1323176 | 27206 | 27225 | N/A | N/A | CGCCAGCATACCAATGGACA | 92 | 1699 |
| 1323190 | 28624 | 28643 | N/A | N/A | AAAGTTTAAAAATTTCCCCC | 97 | 1700 |
| 1323201 | 25203 | 25222 | N/A | N/A | CCATAACCCATTTTTCCTTC | 64 | 1701 |
| 1323212 | 27010 | 27029 | N/A | N/A | TCCACTCTCCCACATACCAT | 70 | 1702 |
| 1323214 | 13819 | 13838 | N/A | N/A | CCTGGATCACCACCTGGGTC | 105 | 1703 |
| 1323267 | 4906 | 4925 | N/A | N/A | TCAGGCCTTCCACACTGACC | 98 | 1704 |
| 1323286 | 8364 | 8383 | N/A | N/A | ATACATCACATCCCCTTATC | 88 | 1705 |
| 1323312 | 5600 | 5619 | N/A | N/A | TGACAGATCATTCATAAGTC | 88 | 1706 |
| 1323328 | 4681 | 4700 | N/A | N/A | CTGGAAAACCAGTCACAGAC | 109 | 1707 |

TABLE 23
Reduction of IFNAR1 RNA by 5-10-5 MOE gapmers with mixed PO/PS internucleoside linkages in
A431 cells

| | SEQ ID | SEQ | SEQ ID | SEQ | | | |
|---|---|---|---|---|---|---|---|
| | NO 1 | ID NO | NO 2 | ID NO | | IFNAR1 | |
| Compound | Start | 1 Stop | Start | 2 Stop | | (% | SEQ ID |
| Number | Site | Site | Site | Site | Sequence (5' to 3') | UTC) | NO |
| 1320908 | 35057 | 35076 | 2329 | 2348 | CATGATTTTACACATGGAAA | 52 | 1708 |
| 1320914 | 38168 | 38187 | 5440 | 5459 | CCTTCTACAATTCAGTAAAA | 61 | 1709 |
| 1320928 | 27436 | 27455 | N/A | N/A | CTTGTCCTAATTATTTTACT | 51 | 1710 |
| 1320940 | 27009 | 27028 | N/A | N/A | CCACTCTCCCACATACCATG | 71 | 1711 |
| 1320975 | 36281 | 36300 | 3553 | 3572 | CCTTTTCTTCCACCAGGATC | 39 | 1712 |
| 1320976 | 24893 | 24912 | N/A | N/A | CTGGACTTCATCCATGTTTA | 57 | 1713 |
| 1320977 | 13511 | 13530 | N/A | N/A | GCTTTTGTCTATCTAAGAAC | 85 | 1714 |
| 1321066 | 22656 | 22675 | 800 | 819 | TGTGGTCTTTATACAATGTA | 24 | 1715 |
| 1321084 | 9419 | 9438 | N/A | N/A | TGACTTTCTAATTTTCCCCA | 79 | 1716 |
| 1321123 | 33680 | 33699 | N/A | N/A | AAATTCACAAAACCCACCCT | 93 | 1717 |
| 1321151 | 19762 | 19781 | N/A | N/A | GCCAAGTTATTACTTATGAA | 15 | 1718 |
| 1321198 | 23329 | 23348 | N/A | N/A | CTTTCATATTTTAACATTCC | 48 | 1719 |
| 1321220 | 24353 | 24372 | N/A | N/A | AATGGAACTTACTGGAGCCA | 87† | 1720 |
| 1321303 | 14343 | 14362 | N/A | N/A | ATGCTGATAATTACATTTCT | 102 | 1721 |
| 1321319 | 38552 | 38571 | 5824 | 5843 | GCTATGCAATACCACAGCAA | 101 | 1722 |
| 1321350 | 13818 | 13837 | N/A | N/A | CTGGATCACCACCTGGGTCA | 102 | 1723 |
| 1321390 | 8835 | 8854 | N/A | N/A | TGTGTTAAACATAAATCTCC | 68 | 1724 |
| 1321409 | 18248 | 18267 | N/A | N/A | AGGTTCCACATCAGAATCTA | 101 | 1725 |
| 1321423 | 30345 | 30364 | N/A | N/A | ATACATTTTATTCCTGGCAA | 89 | 1726 |
| 1321457 | 5955 | 5974 | N/A | N/A | GATGCTAGCCCTGATTCTCT | 82 | 1727 |
| 1321483 | 27941 | 27960 | N/A | N/A | GAGATATGCATCTAACATAA | 53 | 1728 |
| 1321514 | 11706 | 11725 | N/A | N/A | ATGTAATTCATTGAATTCTT | 90 | 1729 |
| 1321576 | 25152 | 25171 | N/A | N/A | CATCTCCTACAATTTTCCAA | 77 | 1730 |
| 1321584 | 26718 | 26737 | N/A | N/A | GCAGGACCTGTAAATACGAT | 96 | 1731 |
| 1321585 | 26903 | 26922 | N/A | N/A | GGTTGACCCTAATCTTGTCC | 59 | 1732 |
| 1321599 | 29987 | 30006 | N/A | N/A | AGGTATTTTCATATTTGTTA | 11 | 1733 |
| 1321617 | 29797 | 29816 | N/A | N/A | GAAAACCGACCATAATTCTC | 87 | 1734 |
| 1321655 | 34492 | 34511 | 1764 | 1783 | TTTCGCTTTCATCTTCATTA | 51 | 1735 |
| 1321716 | 33361 | 33380 | N/A | N/A | CTGAGAAGAATCACATTACA | 82 | 1736 |
| 1321762 | 25922 | 25941 | N/A | N/A | TTTGAGACAATAAACAGCTG | 86 | 1737 |
| 1321770 | 29505 | 29524 | N/A | N/A | TTTTTCATTACCTCCCCAAC | 91 | 1738 |
| 1321786 | 30113 | 30132 | N/A | N/A | ATAGTACCTTACATATAAGT | 69 | 1739 |
| 1321792 | 12575 | 12594 | N/A | N/A | GTATGGAATTTAATCCATTT | 108 | 1740 |
| 1321806 | 37482 | 37501 | 4754 | 4773 | CACAGGTACATATTATATAT | 71 | 1741 |
| 1321823 | 29366 | 29385 | N/A | N/A | AGGAAAACAAACAACTGTAC | 80 | 1742 |
| 1321896 | 22437 | 22456 | N/A | N/A | ACATCGATTAAACAGAGGTA | 76 | 1743 |
| 1321921 | 29027 | 29046 | N/A | N/A | TCTGTATTTTAAAAGCAAAC | 84 | 1744 |
| 1322024 | 25548 | 25567 | N/A | N/A | CCTCTCATTATCTATTTGGT | 53 | 1745 |
| 1322040 | 28552 | 28571 | N/A | N/A | ACAAAATTATACTATACAGT | 100 | 1746 |
| 1322050 | 18607 | 18626 | N/A | N/A | TGAGAACTTTTACCTATGTT | 46 | 1747 |
| 1322075 | 5599 | 5618 | N/A | N/A | GACAGATCATTCATAAGTCA | 96 | 1748 |
| 1322083 | 25200 | 25219 | N/A | N/A | TAACCCATTTTTCCTTCTAC | 75 | 1749 |
| 1322085 | 35879 | 35898 | 3151 | 3170 | AGAGACCACCCATAACAAGA | 83 | 1750 |
| 1322089 | 9742 | 9761 | N/A | N/A | GGCATTTCCTCCCATTCTCC | 69 | 1751 |
| 1322112 | 8637 | 8656 | N/A | N/A | TGGTTCCTACAATATTTCTT | 49 | 1752 |
| 1322176 | 24313 | 24332 | 888 | 907 | TTGCATATGTATAATCCCAT | 5 | 132 |
| 1322200 | 8362 | 8381 | N/A | N/A | ACATCACATCCCCTTATCCC | 89 | 1753 |
| 1322217 | 31173 | 31192 | N/A | N/A | CATTGTATTACCTCTGATTA | 31 | 1754 |
| 1322221 | 32473 | 32492 | N/A | N/A | GTCCACAGCAACCATAGGCA | 57 | 1755 |
| 1322253 | 22203 | 22222 | N/A | N/A | TGCCAAAACCTTCATTCAAC | 71 | 1756 |
| 1322312 | 4905 | 4924 | N/A | N/A | CAGGCCTTCCACACTGACCA | 99 | 1757 |
| 1322363 | 6481 | 6500 | N/A | N/A | GACTGGCCTATACAGCCTCA | 101 | 1758 |
| 1322386 | 7788 | 7807 | N/A | N/A | GTTGCTTTCAACCTTTCACA | 67 | 1759 |
| 1322389 | 25261 | 25280 | N/A | N/A | TTTGCTCTCTCTACTCCTCT | 81 | 1760 |
| 1322393 | 17649 | 17668 | N/A | N/A | ATTTACTTCATGAAATCCGT | 27 | 1761 |
| 1322397 | 30794 | 30813 | N/A | N/A | GCTGAGGAAATCCCTATTTC | 73 | 1762 |
| 1322405 | 4620 | 4639 | N/A | N/A | GGCTTAGTAAACCTCGAGAA | 58 | 1763 |
| 1322432 | 16650 | 16669 | N/A | N/A | TGTAATGTATATATACAGTA | 95 | 1764 |
| 1322436 | 20653 | 20672 | N/A | N/A | GATAAACCTATTTTATGGTA | 83 | 1765 |
| 1322545 | 27192 | 27211 | N/A | N/A | TGGACACTGATTAAGTGCTA | 102 | 1766 |
| 1322559 | 35706 | 35725 | 2978 | 2997 | TGCATACACTATCTTCTGGC | 16 | 1767 |
| 1322577 | 28259 | 28278 | 1104 | 1123 | TATCAAACTTTATCTCTTCA | 76 | 1768 |
| 1322625 | 12191 | 12210 | N/A | N/A | GTTTGAGTATATCATCCCAT | 69 | 1769 |
| 1322644 | 7526 | 7545 | N/A | N/A | CTTGAGTTTTCAACATGATT | 59 | 1770 |
| 1322661 | 35511 | 35530 | 2783 | 2802 | CTTTAATCCTAAACCATGTA | 93 | 1771 |
| 1322729 | 25385 | 25404 | N/A | N/A | TCAAAATTAACACTAAAAGA | 89 | 1772 |
| 1322806 | 25697 | 25716 | N/A | N/A | GTCCTAAACCACACAACACT | 72 | 1773 |
| 1322890 | 31658 | 31677 | N/A | N/A | TTCAGTCTAACATTGGCCTC | 84 | 1774 |
| 1322914 | 31812 | 31831 | 1345 | 1364 | GCTTTCACACAATATACAGT | 34 | 1775 |
| 1322925 | 37135 | 37154 | 4407 | 4426 | CGCTTGTTCACTGAAAACCA | 73 | 1776 |
| 1322932 | 20342 | 20361 | N/A | N/A | GAGAACCACTACTACAGGGA | 13 | 1777 |
| 1322934 | 25762 | 25781 | N/A | N/A | TTAGCCCCTATTCACCTTTA | 53 | 1778 |
| 1322962 | 20032 | 20051 | 381 | 400 | TACTAGTAATATTCTGACAC | 67 | 1779 |
| 1322999 | 28623 | 28642 | N/A | N/A | AAGTTTAAAAATTTCCCCCA | 93 | 1780 |
| 1323131 | 34117 | 34136 | N/A | N/A | AGTGAGGTCACTCATATCTT | 77 | 1781 |
| 1323196 | 16269 | 16288 | N/A | N/A | CTGAGTCTTTAGAAATGCAA | 53 | 1782 |
| 1323242 | 24795 | 24814 | N/A | N/A | TCAAAACCACTAAAGTAATA | 96 | 1783 |
| 1323276 | 11174 | 11193 | N/A | N/A | TTTAGGATCCTCCTATTCTT | 107 | 1784 |

TABLE 24
Reduction of IFNAR1 RNA by 5-10-5 MOE gapmers with mixed PO/PS internucleoside linkages in
A431 cells

| | SEQ ID | SEQ | SEQ ID | SEQ | | | |
|---|---|---|---|---|---|---|---|
| | NO 1 | ID NO | NO 2 | ID NO | | IFNAR1 | |
| Compound | Start | 1 Stop | Start | 2 Stop | | (% | SEQ ID |
| Number | Site | Site | Site | Site | Sequence (5' to 3') | UTC) | NO |
| 1320924 | 12573 | 12592 | N/A | N/A | ATGGAATTTAATCCATTTAC | 101 | 1785 |
| 1320930 | 28549 | 28568 | N/A | N/A | AAATTATACTATACAGTCTT | 71 | 1786 |
| 1320979 | 7787 | 7806 | N/A | N/A | TTGCTTTCAACCTTTCACAT | 63 | 1787 |
| 1321004 | 35877 | 35896 | 3149 | 3168 | AGACCACCCATAACAAGAGT | 108 | 1788 |
| 1321052 | 38159 | 38178 | 5431 | 5450 | ATTCAGTAAAACAAACACTG | 104 | 1789 |
| 1321074 | 29986 | 30005 | N/A | N/A | GGTATTTTCATATTTGTTAC | 13 | 1790 |
| 1321076 | 4619 | 4638 | N/A | N/A | GCTTAGTAAACCTCGAGAAC | 97 | 1791 |
| 1321117 | 4889 | 4908 | N/A | N/A | ACCATGTCAATTACAAGCTT | 63 | 1792 |
| 1321212 | 28997 | 29016 | N/A | N/A | ATGCAGCTCACCCATAACTC | 41 | 1793 |
| 1321248 | 26902 | 26921 | N/A | N/A | GTTGACCCTAATCTTGTCCC | 59 | 1794 |
| 1321272 | 22638 | 22657 | 782 | 801 | TACTGGACTATAGACACCAA | 53 | 1795 |
| 1321290 | 22436 | 22455 | N/A | N/A | CATCGATTAAACAGAGGTAA | 85 | 1796 |
| 1321380 | 9416 | 9435 | N/A | N/A | CTTTCTAATTTTCCCCATAA | 87 | 1797 |
| 1321400 | 25696 | 25715 | N/A | N/A | TCCTAAACCACACAACACTT | 77 | 1798 |
| 1321449 | 25258 | 25277 | N/A | N/A | GCTCTCTCTACTCCTCTGCC | 73 | 1799 |
| 1321453 | 24885 | 24904 | N/A | N/A | CATCCATGTTTAGCTAGCCT | 13 | 1800 |
| 1321502 | 24790 | 24809 | N/A | N/A | ACCACTAAAGTAATAAAGAA | 103 | 1801 |
| 1321509 | 30793 | 30812 | N/A | N/A | CTGAGGAAATCCCTATTTCC | 88 | 1802 |
| 1321539 | 5598 | 5617 | N/A | N/A | ACAGATCATTCATAAGTCAA | 74 | 1803 |
| 1321580 | 34113 | 34132 | N/A | N/A | AGGTCACTCATATCTTAGTA | 30 | 1804 |
| 1321581 | 25353 | 25372 | N/A | N/A | ATAGCGGTACTTACACTTCC | 28 | 1805 |
| 1321591 | 31130 | 31149 | N/A | N/A | GGTTTTGGCCTCAAACTGCC | 84 | 1806 |
| 1321598 | 20639 | 20658 | N/A | N/A | ATGGTAACAAACATTTGCCA | 91 | 1807 |
| 1321701 | 31458 | 31477 | N/A | N/A | ATGCAGATGCCACCACGCCT | 91 | 1808 |
| 1321717 | 20024 | 20043 | 373 | 392 | ATATTCTGACACCCAGACAA | 28 | 1809 |
| 1321724 | 29365 | 29384 | N/A | N/A | GGAAAACAAACAACTGTACT | 85 | 1810 |
| 1321772 | 28622 | 28641 | N/A | N/A | AGTTTAAAAATTTCCCCCAA | 83 | 1811 |
| 1321828 | 7458 | 7477 | N/A | N/A | AAGTCCCCCAACCATCAGAA | 85 | 1812 |
| 1321863 | 8834 | 8853 | N/A | N/A | GTGTTAAACATAAATCTCCA | 49 | 1813 |
| 1321882 | 35023 | 35042 | 2295 | 2314 | GTTTGTCTCAACTCTTTTAA | 20 | 1814 |
| 1321906 | 8361 | 8380 | N/A | N/A | CATCACATCCCCTTATCCCA | 81 | 1815 |
| 1321972 | 37481 | 37500 | 4753 | 4772 | ACAGGTACATATTATATATA | 58 | 1816 |
| 1321982 | 13776 | 13795 | N/A | N/A | ACTGATGGCACCAGTGCCCT | 105 | 1817 |
| 1322002 | 27181 | 27200 | N/A | N/A | TAAGTGCTAAAATAGAGACA | 84 | 1818 |
| 1322012 | 29796 | 29815 | N/A | N/A | AAAACCGACCATAATTCTCA | 65 | 1819 |
| 1322071 | 35446 | 35465 | 2718 | 2737 | AACAGAAGTCCCTCAACATT | 90 | 1820 |
| 1322107 | 27936 | 27955 | N/A | N/A | ATGCATCTAACATAAAAGAA | 71 | 1821 |
| 1322113 | 28255 | 28274 | 1100 | 1119 | AAACTTTATCTCTTCAGACC | 72 | 1822 |
| 1322119 | 18244 | 18263 | N/A | N/A | TCCACATCAGAATCTATTTC | 72 | 1823 |
| 1322120 | 11173 | 11192 | N/A | N/A | TTAGGATCCTCCTATTCTTG | 106 | 1824 |
| 1322140 | 14341 | 14360 | N/A | N/A | GCTGATAATTACATTTCTGC | 83 | 1825 |
| 1322158 | 34489 | 34508 | 1761 | 1780 | CGCTTTCATCTTCATTAGAA | 47 | 1826 |
| 1322161 | 20300 | 20319 | N/A | N/A | GCAGGAAGAAGATATAGGTT | 64 | 1827 |
| 1322173 | 12187 | 12206 | N/A | N/A | GAGTATATCATCCCATCCTC | 88 | 1828 |
| 1322176 | 24313 | 24332 | 888 | 907 | TTGCATATGTATAATCCCAT | 1 | 132 |
| 1322201 | 25198 | 25217 | N/A | N/A | ACCCATTTTTCCTTCTACTT | 58 | 1829 |
| 1322211 | 13510 | 13529 | N/A | N/A | CTTTTGTCTATCTAAGAACA | 91 | 1830 |
| 1322219 | 22202 | 22221 | N/A | N/A | GCCAAAACCTTCATTCAACA | 67 | 1831 |
| 1322234 | 19741 | 19760 | N/A | N/A | CTGAATTTTAAAATACAGTT | 106 | 1832 |
| 1322262 | 38542 | 38561 | 5814 | 5833 | ACCACAGCAAACTTCATTCA | 91 | 1833 |
| 1322344 | 25150 | 25169 | N/A | N/A | TCTCCTACAATTTTCCAATC | 92 | 1834 |
| 1322452 | 23328 | 23347 | N/A | N/A | TTTCATATTTTAACATTCCA | 59 | 1835 |
| 1322468 | 25546 | 25565 | N/A | N/A | TCTCATTATCTATTTGGTGA | 42 | 1836 |
| 1322500 | 33359 | 33378 | N/A | N/A | GAGAAGAATCACATTACAGA | 62 | 1837 |
| 1322525 | 31811 | 31830 | 1344 | 1363 | CTTTCACACAATATACAGTC | 39 | 1838 |
| 1322527 | 11698 | 11717 | N/A | N/A | CATTGAATTCTTCAACTGTA | 102 | 1839 |
| 1322588 | 36280 | 36299 | 3552 | 3571 | CTTTTCTTCCACCAGGATCA | 64 | 1840 |
| 1322601 | 25761 | 25780 | N/A | N/A | TAGCCCCTATTCACCTTTAC | 59 | 1841 |
| 1322638 | 9741 | 9760 | N/A | N/A | GCATTTCCTCCCATTCTCCA | 79 | 1842 |
| 1322753 | 37125 | 37144 | 4397 | 4416 | CTGAAAACCACAGATGGTCT | 69 | 1843 |
| 1322826 | 17634 | 17653 | N/A | N/A | TCCGTTTCATAATATAACTT | 60 | 1844 |
| 1322848 | 25921 | 25940 | N/A | N/A | TTGAGACAATAAACAGCTGT | 68 | 1845 |
| 1322924 | 5935 | 5954 | N/A | N/A | TTGGGTACCCCTCCTCACTA | 89 | 1846 |
| 1322927 | 24341 | 24360 | 916 | 935 | TGGAGCCACTGAACTTGAAA | 1† | 1847 |
| 1322930 | 30112 | 30131 | N/A | N/A | TAGTACCTTACATATAAGTA | 55 | 1848 |
| 1322965 | 8636 | 8655 | N/A | N/A | GGTTCCTACAATATTTCTTT | 46 | 1849 |
| 1323032 | 35705 | 35724 | 2977 | 2996 | GCATACACTATCTTCTGGCA | 31 | 1850 |
| 1323050 | 26715 | 26734 | N/A | N/A | GGACCTGTAAATACGATGGA | 88 | 1851 |
| 1323078 | 27435 | 27454 | N/A | N/A | TTGTCCTAATTATTTTACTA | 83 | 1852 |
| 1323082 | 33679 | 33698 | N/A | N/A | AATTCACAAAACCCACCCTA | 107 | 1853 |
| 1323086 | 29504 | 29523 | N/A | N/A | TTTTCATTACCTCCCCAACT | 89 | 1854 |
| 1323093 | 18606 | 18625 | N/A | N/A | GAGAACTTTTACCTATGTTA | 24 | 1855 |
| 1323115 | 27008 | 27027 | N/A | N/A | CACTCTCCCACATACCATGT | 78 | 1856 |
| 1323189 | 30309 | 30328 | N/A | N/A | AGCCAAGCCAAACCCTGCAA | 82 | 1857 |
| 1323204 | 6425 | 6444 | N/A | N/A | TGTCTGTTAACTAAGCATAA | 86 | 1858 |
| 1323227 | 32457 | 32476 | N/A | N/A | GGCAATGACATTTACATTTA | 9 | 1859 |
| 1323289 | 16254 | 16273 | N/A | N/A | TGCAAGGTCCAATATATCGA | 28 | 1860 |
| 1323332 | 16591 | 16610 | N/A | N/A | ATTTGTTTATATATGCATAC | 86 | 1861 |

TABLE 25
Reduction of IFNAR1 RNA by 5-10-5 MOE gapmers with mixed PO/PS internucleoside linkages in
A431 cells

| | SEQ ID | SEQ | SEQ ID | SEQ | | | |
|---|---|---|---|---|---|---|---|
| | NO 1 | ID NO | NO 2 | ID NO | | IFNAR1 | |
| Compound | Start | 1 Stop | Start | 2 Stop | | (% | SEQ ID |
| Number | Site | Site | Site | Site | Sequence (5' to 3') | UTC) | NO |
| 1320894 | 25149 | 25168 | N/A | N/A | CTCCTACAATTTTCCAATCA | 97 | 1862 |
| 1320904 | 25875 | 25894 | N/A | N/A | GTTACAGACACAGAAAACTA | 98 | 1863 |
| 1320922 | 31129 | 31148 | N/A | N/A | GTTTTGGCCTCAAACTGCCT | 79 | 1864 |
| 1320937 | 12504 | 12523 | N/A | N/A | AAGTTTTCTAATAATATCCT | 105 | 1865 |
| 1320952 | 31810 | 31829 | 1343 | 1362 | TTTCACACAATATACAGTCA | 49 | 1866 |
| 1321089 | 7443 | 7462 | N/A | N/A | CAGAATGGACCCCTTCTCCT | 95 | 1867 |
| 1321102 | 20015 | 20034 | 364 | 383 | CACCCAGACAATTTTATCCA | 72 | 1868 |
| 1321144 | 38157 | 38176 | 5429 | 5448 | TCAGTAAAACAAACACTGCC | 100 | 1869 |
| 1321183 | 22426 | 22445 | N/A | N/A | ACAGAGGTAAAAATAATGCT | 71 | 1870 |
| 1321224 | 36262 | 36281 | 3534 | 3553 | CATCTGTTTTTTCAGCAGAA | 79 | 1871 |
| 1321245 | 5546 | 5565 | N/A | N/A | CCAACTGTAACTTCAGGTCT | 57 | 1872 |
| 1321273 | 6420 | 6439 | N/A | N/A | GTTAACTAAGCATAACAGTA | 77 | 1873 |
| 1321302 | 27112 | 27131 | N/A | N/A | GTAACTTGCCCAGAAACCAA | 92 | 1874 |
| 1321377 | 34109 | 34128 | N/A | N/A | CACTCATATCTTAGTACCTT | 19 | 1875 |
| 1321387 | 28621 | 28640 | N/A | N/A | GTTTAAAAATTTCCCCCAAA | 102 | 1876 |
| 1321447 | 23327 | 23346 | N/A | N/A | TTCATATTTTAACATTCCAC | 41 | 1877 |
| 1321463 | 9740 | 9759 | N/A | N/A | CATTTCCTCCCATTCTCCAT | 105 | 1878 |
| 1321471 | 25257 | 25276 | N/A | N/A | CTCTCTCTACTCCTCTGCCA | 77 | 1879 |
| 1321473 | 33358 | 33377 | N/A | N/A | AGAAGAATCACATTACAGAC | 80 | 1880 |
| 1321488 | 35830 | 35849 | 3102 | 3121 | GCTCAGGCTTCCAGTGGAAC | 68 | 1881 |
| 1321607 | 32456 | 32475 | N/A | N/A | GCAATGACATTTACATTTAA | 37 | 1882 |
| 1321616 | 38540 | 38559 | 5812 | 5831 | CACAGCAAACTTCATTCAAT | 83 | 1883 |
| 1321634 | 33650 | 33669 | N/A | N/A | ATGGTTTCCCAGGAACAGAT | 44 | 1884 |
| 1321672 | 4888 | 4907 | N/A | N/A | CCATGTCAATTACAAGCTTA | 74 | 1885 |
| 1321695 | 26700 | 26719 | N/A | N/A | ATGGAGGCCCTCCTCTCATA | 100 | 1886 |
| 1321737 | 25536 | 25555 | N/A | N/A | TATTTGGTGACCCTATTATT | 67 | 1887 |
| 1321741 | 35445 | 35464 | 2717 | 2736 | ACAGAAGTCCCTCAACATTT | 60 | 1888 |
| 1321777 | 8631 | 8650 | N/A | N/A | CTACAATATTTCTTTTACTT | 102 | 1889 |
| 1321854 | 22633 | 22652 | 777 | 796 | GACTATAGACACCAATTTTC | 25 | 1890 |
| 1321874 | 37093 | 37112 | 4365 | 4384 | CCTTGTGCTCCAACTTCCTA | 63 | 1891 |
| 1321884 | 27935 | 27954 | N/A | N/A | TGCATCTAACATAAAAGAAA | 87 | 1892 |
| 1321895 | 37480 | 37499 | 4752 | 4771 | CAGGTACATATTATATATAA | 45 | 1893 |
| 1321905 | 20250 | 20269 | N/A | N/A | TTAGATTTTGCATCATGCAA | 92 | 1894 |
| 1321942 | 24783 | 24802 | N/A | N/A | AAGTAATAAAGAAAATAGGA | 94 | 1895 |
| 1321967 | 29976 | 29995 | N/A | N/A | TATTTGTTACTTCCTTTTAA | 63 | 1896 |
| 1321973 | 7785 | 7804 | N/A | N/A | GCTTTCAACCTTTCACATTC | 53 | 1897 |
| 1321986 | 16580 | 16599 | N/A | N/A | TATGCATACACAATTACTGA | 80 | 1898 |
| 1322008 | 24878 | 24897 | N/A | N/A | GTTTAGCTAGCCTCTGCTCA | 81 | 1899 |
| 1322023 | 34488 | 34507 | 1760 | 1779 | GCTTTCATCTTCATTAGAAT | 32 | 1900 |
| 1322077 | 11669 | 11688 | N/A | N/A | TGGTTGTTTTTCATCATGTT | 50 | 1901 |
| 1322081 | 12185 | 12204 | N/A | N/A | GTATATCATCCCATCCTCTT | 99 | 1902 |
| 1322141 | 11170 | 11189 | N/A | N/A | GGATCCTCCTATTCTTGTCT | 104 | 1903 |
| 1322155 | 35685 | 35704 | 2957 | 2976 | TGGCATGTATACTAAAACTT | 29 | 1904 |
| 1322176 | 24313 | 24332 | 888 | 907 | TTGCATATGTATAATCCCAT | 2 | 132 |
| 1322231 | 5934 | 5953 | N/A | N/A | TGGGTACCCCTCCTCACTAC | 123 | 1905 |
| 1322239 | 8831 | 8850 | N/A | N/A | TTAAACATAAATCTCCAACT | 81 | 1906 |
| 1322255 | 25197 | 25216 | N/A | N/A | CCCATTTTTCCTTCTACTTA | 72 | 1907 |
| 1322301 | 9414 | 9433 | N/A | N/A | TTCTAATTTTCCCCATAAAT | 116 | 1908 |
| 1322325 | 29795 | 29814 | N/A | N/A | AAACCGACCATAATTCTCAA | 58 | 1909 |
| 1322346 | 26893 | 26912 | N/A | N/A | AATCTTGTCCCATTCTACTT | 102 | 1910 |
| 1322378 | 28254 | 28273 | 1099 | 1118 | AACTTTATCTCTTCAGACCA | 64 | 1911 |
| 1322434 | 31457 | 31476 | N/A | N/A | TGCAGATGCCACCACGCCTA | 75 | 1912 |
| 1322454 | 30111 | 30130 | N/A | N/A | AGTACCTTACATATAAGTAT | 48 | 1913 |
| 1322493 | 30792 | 30811 | N/A | N/A | TGAGGAAATCCCTATTTCCA | 101 | 1914 |
| 1322528 | 25695 | 25714 | N/A | N/A | CCTAAACCACACAACACTTT | 99 | 1915 |
| 1322535 | 18590 | 18609 | N/A | N/A | GTTAAGCCCATTGACCATAA | 14 | 1916 |
| 1322541 | 20638 | 20657 | N/A | N/A | TGGTAACAAACATTTGCCAA | 95 | 1917 |
| 1322641 | 4606 | 4625 | N/A | N/A | CGAGAACTGACAATTATGCT | 52 | 1918 |
| 1322668 | 28996 | 29015 | N/A | N/A | TGCAGCTCACCCATAACTCT | 52 | 1919 |
| 1322698 | 19725 | 19744 | N/A | N/A | AGTTCTTTATATAATTTTGT | 80 | 1920 |
| 1322709 | 29503 | 29522 | N/A | N/A | TTTCATTACCTCCCCAACTA | 89 | 1921 |
| 1322738 | 16253 | 16272 | N/A | N/A | GCAAGGTCCAATATATCGAT | 23 | 1922 |
| 1322810 | 27434 | 27453 | N/A | N/A | TGTCCTAATTATTTTACTAC | 66 | 1923 |
| 1322821 | 13755 | 13774 | N/A | N/A | AGTCTGGACATCCAGCTGCC | 87 | 1924 |
| 1322828 | 22201 | 22220 | N/A | N/A | CCAAAACCTTCATTCAACAA | 76 | 1925 |
| 1322857 | 27007 | 27026 | N/A | N/A | ACTCTCCCACATACCATGTC | 63 | 1926 |
| 1322906 | 30296 | 30315 | N/A | N/A | CCTGCAAGCACACTTAAGGC | 112 | 1927 |
| 1322939 | 28541 | 28560 | N/A | N/A | CTATACAGTCTTTTTACCTC | 87 | 1928 |
| 1322943 | 25352 | 25371 | N/A | N/A | TAGCGGTACTTACACTTCCC | 9 | 1929 |
| 1322945 | 8360 | 8379 | N/A | N/A | ATCACATCCCCTTATCCCAC | 80 | 1930 |
| 1322960 | 13505 | 13524 | N/A | N/A | GTCTATCTAAGAACATCTTA | 98 | 1931 |
| 1322986 | 24315 | 24334 | 890 | 909 | GTTTGCATATGTATAATCCC | N.D. | 1932 |
| 1323017 | 35021 | 35040 | 2293 | 2312 | TTGTCTCAACTCTTTTAATT | 28 | 1933 |
| 1323062 | 14338 | 14357 | N/A | N/A | GATAATTACATTTCTGCATC | 86 | 1934 |
| 1323135 | 18242 | 18261 | N/A | N/A | CACATCAGAATCTATTTCTA | 65 | 1935 |
| 1323163 | 29360 | 29379 | N/A | N/A | ACAAACAACTGTACTACATA | 81 | 1936 |
| 1323298 | 17632 | 17651 | N/A | N/A | CGTTTCATAATATAACTTCA | 76 | 1937 |
| 1323340 | 25760 | 25779 | N/A | N/A | AGCCCCTATTCACCTTTACA | 75 | 1938 |

TABLE 26
Reduction of IFNAR1 RNA by 5-10-5 MOE gapmers with mixed PO/PS internucleoside linkages in
A431 cells

| | SEQ ID | SEQ | SEQ ID | SEQ | | | |
|---|---|---|---|---|---|---|---|
| | NO 1 | ID NO | NO 2 | ID NO | | IFNAR1 | |
| Compound | Start | 1 Stop | Start | 2 Stop | | (% | SEQ ID |
| Number | Site | Site | Site | Site | Sequence (5' to 3') | UTC) | NO |
| 1320905 | 26987 | 27006 | N/A | N/A | GCCGCATGCACCTTCCTCAA | 63 | 1939 |
| 1320941 | 29790 | 29809 | N/A | N/A | GACCATAATTCTCAATGGGC | 57 | 1940 |
| 1320942 | 29354 | 29373 | N/A | N/A | AACTGTACTACATAAATTCT | 81 | 1941 |
| 1320970 | 33357 | 33376 | N/A | N/A | GAAGAATCACATTACAGACT | 62 | 1942 |
| 1321017 | 13754 | 13773 | N/A | N/A | GTCTGGACATCCAGCTGCCC | 94 | 1943 |
| 1321022 | 30295 | 30314 | N/A | N/A | CTGCAAGCACACTTAAGGCC | 97 | 1944 |
| 1321037 | 5931 | 5950 | N/A | N/A | GTACCCCTCCTCACTACAAA | 112 | 1945 |
| 1321134 | 12503 | 12522 | N/A | N/A | AGTTTTCTAATAATATCCTT | 99 | 1946 |
| 1321254 | 6412 | 6431 | N/A | N/A | AGCATAACAGTATCTACACT | 74 | 1947 |
| 1321264 | 37089 | 37108 | 4361 | 4380 | GTGCTCCAACTTCCTAGAGA | 54 | 1948 |
| 1321291 | 14296 | 14315 | N/A | N/A | GATTTTTTTTCCTCTTTGAA | 68 | 1949 |
| 1321309 | 22191 | 22210 | N/A | N/A | CATTCAACAAATAATTCTGA | 92 | 1950 |
| 1321342 | 19688 | 19707 | N/A | N/A | AGCAGAGAAATAAATGACCC | 71 | 1951 |
| 1321408 | 20592 | 20611 | N/A | N/A | GCTGTTTTACATTTTTTTTC | 37 | 1952 |
| 1321443 | 17631 | 17650 | N/A | N/A | GTTTCATAATATAACTTCAT | 91 | 1953 |
| 1321444 | 13500 | 13519 | N/A | N/A | TCTAAGAACATCTTAATTTC | 111 | 1954 |
| 1321458 | 20014 | 20033 | 363 | 382 | ACCCAGACAATTTTATCCAA | 32 | 1955 |
| 1321553 | 27107 | 27126 | N/A | N/A | TTGCCCAGAAACCAACAGCT | 99 | 1956 |
| 1321556 | 34487 | 34506 | 1759 | 1778 | CTTTCATCTTCATTAGAATA | 101 | 1957 |
| 1321627 | 30791 | 30810 | N/A | N/A | GAGGAAATCCCTATTTCCAA | 101 | 1958 |
| 1321631 | 5537 | 5556 | N/A | N/A | ACTTCAGGTCTACAACCTAA | 71 | 1959 |
| 1321667 | 28995 | 29014 | N/A | N/A | GCAGCTCACCCATAACTCTA | 38 | 1960 |
| 1321680 | 11127 | 11146 | N/A | N/A | CAAGGCAACACCTCTTGGTG | 99 | 1961 |
| 1321729 | 35019 | 35038 | 2291 | 2310 | GTCTCAACTCTTTTAATTTC | 11 | 1962 |
| 1321732 | 37436 | 37455 | 4708 | 4727 | ATAAAATTATTTCTGGCTCT | 59 | 1963 |
| 1321742 | 11666 | 11685 | N/A | N/A | TTGTTTTTCATCATGTTTTA | 95 | 1964 |
| 1321756 | 25872 | 25891 | N/A | N/A | ACAGACACAGAAAACTAACA | 86 | 1965 |
| 1321820 | 16252 | 16271 | N/A | N/A | CAAGGTCCAATATATCGATT | 24 | 1966 |
| 1321867 | 27421 | 27440 | N/A | N/A | TTACTACATTTTATTTTCTA | 107 | 1967 |
| 1321872 | 25351 | 25370 | N/A | N/A | AGCGGTACTTACACTTCCCT | 8 | 1968 |
| 1321875 | 25694 | 25713 | N/A | N/A | CTAAACCACACAACACTTTG | 81 | 1969 |
| 1321898 | 26699 | 26718 | N/A | N/A | TGGAGGCCCTCCTCTCATAA | 101 | 1970 |
| 1321918 | 12181 | 12200 | N/A | N/A | ATCATCCCATCCTCTTCTGC | 92 | 1971 |
| 1321927 | 33959 | 33978 | N/A | N/A | ATGTTTGTATCCAACACATA | 90 | 1972 |
| 1321939 | 26892 | 26911 | N/A | N/A | ATCTTGTCCCATTCTACTTA | 99 | 1973 |
| 1321950 | 25196 | 25215 | N/A | N/A | CCATTTTTCCTTCTACTTAA | 83 | 1974 |
| 1321959 | 24873 | 24892 | N/A | N/A | GCTAGCCTCTGCTCAACCAC | 89 | 1975 |
| 1321997 | 18241 | 18260 | N/A | N/A | ACATCAGAATCTATTTCTAA | 87 | 1976 |
| 1322011 | 28253 | 28272 | 1098 | 1117 | ACTTTATCTCTTCAGACCAA | 57 | 1977 |
| 1322043 | 38156 | 38175 | 5428 | 5447 | CAGTAAAACAAACACTGCCA | 89 | 1978 |
| 1322082 | 35820 | 35839 | 3092 | 3111 | CCAGTGGAACATTCTTCTTC | 39 | 1979 |
| 1322093 | 25535 | 25554 | N/A | N/A | ATTTGGTGACCCTATTATTT | 42 | 1980 |
| 1322094 | 29974 | 29993 | N/A | N/A | TTTGTTACTTCCTTTTAAAC | 76 | 1981 |
| 1322132 | 35683 | 35702 | 2955 | 2974 | GCATGTATACTAAAACTTGT | 82 | 1982 |
| 1322153 | 8822 | 8841 | N/A | N/A | AATCTCCAACTAGATTGCAA | 83 | 1983 |
| 1322166 | 27934 | 27953 | N/A | N/A | GCATCTAACATAAAAGAAAA | 92 | 1984 |
| 1322176 | 24313 | 24332 | 888 | 907 | TTGCATATGTATAATCCCAT | 2 | 132 |
| 1322197 | 22603 | 22622 | 747 | 766 | GTAGTGCTGCTTTAACTTTT | 4 | 1985 |
| 1322232 | 25256 | 25275 | N/A | N/A | TCTCTCTACTCCTCTGCCAC | 68 | 1986 |
| 1322245 | 29502 | 29521 | N/A | N/A | TTCATTACCTCCCCAACTAA | 94 | 1987 |
| 1322324 | 4603 | 4622 | N/A | N/A | GAACTGACAATTATGCTTCA | 110 | 1988 |
| 1322349 | N/A | N/A | 1288 | 1307 | TTCTCGATAATTTTTCTCTC | 44 | 1989 |
| 1322361 | 7438 | 7457 | N/A | N/A | TGGACCCCTTCTCCTGACCA | 108 | 1990 |
| 1322412 | 7784 | 7803 | N/A | N/A | CTTTCAACCTTTCACATTCA | 81 | 1991 |
| 1322433 | 22425 | 22444 | N/A | N/A | CAGAGGTAAAAATAATGCTT | 53 | 1992 |
| 1322440 | 23326 | 23345 | N/A | N/A | TCATATTTTAACATTCCACT | 30 | 1993 |
| 1322445 | 25148 | 25167 | N/A | N/A | TCCTACAATTTTCCAATCAA | 86 | 1994 |
| 1322484 | 31456 | 31475 | N/A | N/A | GCAGATGCCACCACGCCTAA | 64 | 1995 |
| 1322487 | 24782 | 24801 | N/A | N/A | AGTAATAAAGAAAATAGGAA | 100 | 1996 |
| 1322491 | 28612 | 28631 | N/A | N/A | TTTCCCCCAAATTTTACATT | 100 | 1997 |
| 1322492 | 35442 | 35461 | 2714 | 2733 | GAAGTCCCTCAACATTTTTA | 58 | 1998 |
| 1322595 | 32451 | 32470 | N/A | N/A | GACATTTACATTTAAAGATT | 70 | 1999 |
| 1322699 | 16577 | 16596 | N/A | N/A | GCATACACAATTACTGAAGC | 45 | 2000 |
| 1322701 | 8359 | 8378 | N/A | N/A | TCACATCCCCTTATCCCACT | 85 | 2001 |
| 1322728 | 4875 | 4894 | N/A | N/A | AAGCTTATCTTCTCAGGTGC | 49 | 2002 |
| 1322783 | 20240 | 20259 | N/A | N/A | CATCATGCAAATGAATGGCT | 84 | 2003 |
| 1322808 | 9394 | 9413 | N/A | N/A | GCAGTTGTTTTTAAATGTCC | 65 | 2004 |
| 1322880 | 9715 | 9734 | N/A | N/A | CATCCCACTTTTCTCTGCTC | 87 | 2005 |
| 1322883 | 25759 | 25778 | N/A | N/A | GCCCCTATTCACCTTTACAT | 85 | 2006 |
| 1322900 | 38537 | 38556 | 5809 | 5828 | AGCAAACTTCATTCAATGAA | 88 | 2007 |
| 1322982 | 18584 | 18603 | N/A | N/A | CCCATTGACCATAAGTAGCA | 50 | 2008 |
| 1323013 | 33636 | 33655 | N/A | N/A | ACAGATTCTATGTTTAGGCC | 53 | 2009 |
| 1323029 | 24311 | 24330 | 886 | 905 | GCATATGTATAATCCCATTT | N.D. | 2010 |
| 1323046 | 36251 | 36270 | 3523 | 3542 | TCAGCAGAAATGACTACTTA | 56 | 2011 |
| 1323258 | 31128 | 31147 | N/A | N/A | TTTTGGCCTCAAACTGCCTT | 85 | 2012 |
| 1323259 | 30110 | 30129 | N/A | N/A | GTACCTTACATATAAGTATT | 61 | 2013 |
| 1323262 | 31793 | 31812 | 1326 | 1345 | TCAGTGGTTTCAAATTAGGA | 7 | 2014 |
| 1323324 | 8630 | 8649 | N/A | N/A | TACAATATTTCTTTTACTTC | 97 | 2015 |

TABLE 27
Reduction of IFNAR1 RNA by 5-10-5 MOE gapmers with mixed PO/PS internucleoside linkages
in A431 cells

| | SEQ ID | SEQ ID | SEQ ID | SEQ ID | | | |
|---|---|---|---|---|---|---|---|
| | NO 1 | NO 1 | NO 2 | NO 2 | | IFNAR1 | |
| Compound | Start | Stop | Start | Stop | | (% | SEQ ID |
| Number | Site | Site | Site | Site | Sequence (5' to 3') | UTC) | NO |
| 1320926 | 27931 | 27950 | N/A | N/A | TCTAACATAAAAGAAAACCA | 74 | 2016 |
| 1321050 | 31317 | 31336 | N/A | N/A | TGTGTGAGAAATATAAATTT | 62 | 2017 |
| 1321060 | 14177 | 14196 | N/A | N/A | GTTCAACTGTTTTATGGCCT | 94 | 2018 |
| 1321083 | N/A | N/A | 1287 | 1306 | TCTCGATAATTTTTCTCTCA | 25 | 2019 |
| 1321085 | 6409 | 6428 | N/A | N/A | ATAACAGTATCTACACTGCT | 105 | 2020 |
| 1321088 | 4574 | 4593 | N/A | N/A | ACTGTCATTTTTTATTGGCC | 46 | 2021 |
| 1321092 | 37425 | 37444 | 4697 | 4716 | TCTGGCTCTAATGATACAAA | 26 | 2022 |
| 1321103 | 9714 | 9733 | N/A | N/A | ATCCCACTTTTCTCTGCTCA | 79 | 2023 |
| 1321135 | 33626 | 33645 | N/A | N/A | TGTTTAGGCCTTCACCATTC | 40 | 2024 |
| 1321227 | 5924 | 5943 | N/A | N/A | TCCTCACTACAAAATTACCT | 103 | 2025 |
| 1321246 | 27420 | 27439 | N/A | N/A | TACTACATTTTATTTTCTAA | 92 | 2026 |
| 1321256 | 31118 | 31137 | N/A | N/A | AAACTGCCTTATTAAGAGTA | 84 | 2027 |
| 1321310 | 24309 | 24328 | 884 | 903 | ATATGTATAATCCCATTTAA | 50 | 2028 |
| 1321321 | 25534 | 25553 | N/A | N/A | TTTGGTGACCCTATTATTTA | 23 | 2029 |
| 1321353 | 26985 | 27004 | N/A | N/A | CGCATGCACCTTCCTCAAAT | 89 | 2030 |
| 1321376 | 29789 | 29808 | N/A | N/A | ACCATAATTCTCAATGGGCT | 43 | 2031 |
| 1321394 | 7437 | 7456 | N/A | N/A | GGACCCCTTCTCCTGACCAA | 71 | 2032 |
| 1321417 | 8357 | 8376 | N/A | N/A | ACATCCCCTTATCCCACTCT | 80 | 2033 |
| 1321430 | 8629 | 8648 | N/A | N/A | ACAATATTTCTTTTACTTCT | 68 | 2034 |
| 1321450 | 18565 | 18584 | N/A | N/A | AGAGAAACTATCTTCTGGGA | 52 | 2035 |
| 1321462 | 29973 | 29992 | N/A | N/A | TTGTTACTTCCTTTTAAACC | 27 | 2036 |
| 1321482 | 37088 | 37107 | 4360 | 4379 | TGCTCCAACTTCCTAGAGAC | 75 | 2037 |
| 1321485 | 24867 | 24886 | N/A | N/A | CTCTGCTCAACCACATAGAA | 82 | 2038 |
| 1321504 | 24766 | 24785 | N/A | N/A | GGAAGGCTAATTTTTTGAAT | 23 | 2039 |
| 1321541 | 20591 | 20610 | N/A | N/A | CTGTTTTACATTTTTTTTCC | 14 | 2040 |
| 1321623 | 11067 | 11086 | N/A | N/A | TCTTGATTCCAGATGAAGGT | 68 | 2041 |
| 1321657 | 35438 | 35457 | 2710 | 2729 | TCCCTCAACATTTTTAGGGA | 104 | 2042 |
| 1321677 | 32401 | 32420 | N/A | N/A | GGAGAAATACAATATTGACA | 32 | 2043 |
| 1321686 | 16559 | 16578 | N/A | N/A | GCTGTGAGATTCATATGCCA | 94 | 2044 |
| 1321708 | 28611 | 28630 | N/A | N/A | TTCCCCCAAATTTTACATTC | 96 | 2045 |
| 1321714 | 25869 | 25888 | N/A | N/A | GACACAGAAAACTAACATCT | 60 | 2046 |
| 1321720 | 30294 | 30313 | N/A | N/A | TGCAAGCACACTTAAGGCCT | 101 | 2047 |
| 1321753 | 16064 | 16083 | N/A | N/A | GCCCAGTTAACAATATATTT | 84 | 2048 |
| 1321757 | 12502 | 12521 | N/A | N/A | GTTTTCTAATAATATCCTTT | 51 | 2049 |
| 1321795 | 17627 | 17646 | N/A | N/A | CATAATATAACTTCATGCCA | 72 | 2050 |
| 1321891 | 12180 | 12199 | N/A | N/A | TCATCCCATCCTCTTCTGCA | 99 | 2051 |
| 1321998 | 19687 | 19706 | N/A | N/A | GCAGAGAAATAAATGACCCA | 59 | 2052 |
| 1322072 | 36248 | 36267 | 3520 | 3539 | GCAGAAATGACTACTTAAAC | 27 | 2053 |
| 1322088 | 22187 | 22206 | N/A | N/A | CAACAAATAATTCTGAGCAC | 52 | 2054 |
| 1322117 | 38155 | 38174 | 5427 | 5446 | AGTAAAACAAACACTGCCAC | 76 | 2055 |
| 1322128 | 35018 | 35037 | 2290 | 2309 | TCTCAACTCTTTTAATTTCT | 11 | 2056 |
| 1322133 | 34485 | 34504 | 1757 | 1776 | TTCATCTTCATTAGAATAAT | 71 | 2057 |
| 1322138 | 35819 | 35838 | 3091 | 3110 | CAGTGGAACATTCTTCTTCC | 24 | 2058 |
| 1322165 | 22599 | 22618 | 743 | 762 | TGCTGCTTTAACTTTTAGAC | 27 | 2059 |
| 1322171 | 28230 | 28249 | 1075 | 1094 | GATGTGTTATTTCCATCAGA | 38 | 2060 |
| 1322176 | 24313 | 24332 | 888 | 907 | TTGCATATGTATAATCCCAT | 7 | 132 |
| 1322189 | 13743 | 13762 | N/A | N/A | CAGCTGCCCCTCACACACCT | 79 | 2061 |
| 1322266 | 26697 | 26716 | N/A | N/A | GAGGCCCTCCTCTCATAATT | 84 | 2062 |
| 1322306 | 29353 | 29372 | N/A | N/A | ACTGTACTACATAAATTCTT | 61 | 2063 |
| 1322371 | 38516 | 38535 | 5788 | 5807 | ACTGAGCTCCAGCCATGTCT | 71 | 2064 |
| 1322453 | 25191 | 25210 | N/A | N/A | TTTCCTTCTACTTAATTTTC | 75 | 2065 |
| 1322533 | 28994 | 29013 | N/A | N/A | CAGCTCACCCATAACTCTAC | 51 | 2066 |
| 1322591 | 25255 | 25274 | N/A | N/A | CTCTCTACTCCTCTGCCACC | 50 | 2067 |
| 1322721 | 5533 | 5552 | N/A | N/A | CAGGTCTACAACCTAAGTCT | 105 | 2068 |
| 1322799 | 29496 | 29515 | N/A | N/A | ACCTCCCCAACTAAACAACT | 75 | 2069 |
| 1322814 | 30790 | 30809 | N/A | N/A | AGGAAATCCCTATTTCCAAA | 99 | 2070 |
| 1322844 | 20207 | 20226 | N/A | N/A | GCTCTGGTAATATTTACTAA | 20 | 2071 |
| 1322870 | 27105 | 27124 | N/A | N/A | GCCCAGAAACCAACAGCTAA | 70 | 2072 |
| 1322871 | 25146 | 25165 | N/A | N/A | CTACAATTTTCCAATCAATA | 84 | 2073 |
| 1322876 | 23269 | 23288 | N/A | N/A | TAGCAACTACTTCCCCACCT | 69 | 2074 |
| 1322926 | 33958 | 33977 | N/A | N/A | TGTTTGTATCCAACACATAT | 52 | 2075 |
| 1322935 | 25758 | 25777 | N/A | N/A | CCCCTATTCACCTTTACATT | 67 | 2076 |
| 1323007 | 25692 | 25711 | N/A | N/A | AAACCACACAACACTTTGCA | 53 | 2077 |
| 1323044 | 8809 | 8828 | N/A | N/A | ATTGCAAGTTCCTTAAGGGC | 51 | 2078 |
| 1323056 | 20013 | 20032 | 362 | 381 | CCCAGACAATTTTATCCAAT | 17 | 2079 |
| 1323077 | 26891 | 26910 | N/A | N/A | TCTTGTCCCATTCTACTTAT | 58 | 2080 |
| 1323133 | 30109 | 30128 | N/A | N/A | TACCTTACATATAAGTATTC | 53 | 2081 |
| 1323138 | 13499 | 13518 | N/A | N/A | CTAAGAACATCTTAATTTCC | 86 | 2082 |
| 1323167 | 31792 | 31811 | 1325 | 1344 | CAGTGGTTTCAAATTAGGAA | 4 | 2083 |
| 1323177 | 11614 | 11633 | N/A | N/A | GTTTTCCTGATTCATTGAAC | 59 | 2084 |
| 1323185 | 22424 | 22443 | N/A | N/A | AGAGGTAAAAATAATGCTTA | 57 | 2085 |
| 1323193 | 25350 | 25369 | N/A | N/A | GCGGTACTTACACTTCCCTT | 26 | 2086 |
| 1323208 | 18232 | 18251 | N/A | N/A | TCTATTTCTAAAAATCCAGA | 76 | 2087 |
| 1323228 | 35681 | 35700 | 2953 | 2972 | ATGTATACTAAAACTTGTAC | 75 | 2088 |
| 1323238 | 9393 | 9412 | N/A | N/A | CAGTTGTTTTTAAATGTCCT | 27 | 2089 |
| 1323260 | 4862 | 4881 | N/A | N/A | CAGGTGCAAAACAAAGTCAA | 82 | 2090 |
| 1323284 | 33356 | 33375 | N/A | N/A | AAGAATCACATTACAGACTT | 55 | 2091 |
| 1323338 | 7782 | 7801 | N/A | N/A | TTCAACCTTTCACATTCATT | 77 | 2092 |

TABLE 28
Reduction of IFNAR1 RNA by 5-10-5 MOE gapmers with mixed PO/PS internucleoside linkages
in A431 cells

| | SEQ ID | SEQ ID | SEQ ID | SEQ ID | | | |
|---|---|---|---|---|---|---|---|
| | NO 1 | NO 1 | NO 2 | NO 2 | | IFNAR1 | |
| Compound | Start | Stop | Start | Stop | | (% | SEQ ID |
| Number | Site | Site | Site | Site | Sequence (5' to 3') | UTC) | NO |
| 1320896 | 8627 | 8646 | N/A | N/A | AATATTTCTTTTACTTCTGC | 58 | 2093 |
| 1320910 | 4573 | 4592 | N/A | N/A | CTGTCATTTTTTATTGGCCT | 54 | 2094 |
| 1320965 | 33953 | 33972 | N/A | N/A | GTATCCAACACATATATATC | 43 | 2095 |
| 1321001 | 5923 | 5942 | N/A | N/A | CCTCACTACAAAATTACCTC | 96 | 2096 |
| 1321003 | 35668 | 35687 | 2940 | 2959 | CTTGTACACACTCTCAGATC | 43 | 2097 |
| 1321009 | 31107 | 31126 | N/A | N/A | TTAAGAGTATCACTTACAGC | 29 | 2098 |
| 1321070 | 25145 | 25164 | N/A | N/A | TACAATTTTCCAATCAATAT | 77 | 2099 |
| 1321111 | 35425 | 35444 | 2697 | 2716 | TTAGGGATCATCTTTCTGGC | 18 | 2100 |
| 1321163 | 31315 | 31334 | N/A | N/A | TGTGAGAAATATAAATTTGT | 63 | 2101 |
| 1321244 | 23267 | 23286 | N/A | N/A | GCAACTACTTCCCCACCTTT | 75 | 2102 |
| 1321283 | 22057 | 22076 | N/A | N/A | AGCAGCAGTCTAACACTGAA | 61 | 2103 |
| 1321324 | 8808 | 8827 | N/A | N/A | TTGCAAGTTCCTTAAGGGCA | 63 | 2104 |
| 1321327 | 11016 | 11035 | N/A | N/A | GCTCAGGATCTCACAAACCT | 51 | 2105 |
| 1321328 | 29972 | 29991 | N/A | N/A | TGTTACTTCCTTTTAAACCT | 17 | 2106 |
| 1321351 | 38154 | 38173 | 5426 | 5445 | GTAAAACAAACACTGCCACA | 57 | 2107 |
| 1321360 | 27930 | 27949 | N/A | N/A | CTAACATAAAAGAAAACCAA | 68 | 2108 |
| 1321363 | 26692 | 26711 | N/A | N/A | CCTCCTCTCATAATTAGGTT | 69 | 2109 |
| 1321391 | 33625 | 33644 | N/A | N/A | GTTTAGGCCTTCACCATTCA | 73 | 2110 |
| 1321477 | 18564 | 18583 | N/A | N/A | GAGAAACTATCTTCTGGGAA | 43 | 2111 |
| 1321479 | 25347 | 25366 | N/A | N/A | GTACTTACACTTCCCTTCTC | 69 | 2112 |
| 1321557 | 12148 | 12167 | N/A | N/A | TGTGAAGAAATCTGCTGTTA | 59 | 2113 |
| 1321649 | 7781 | 7800 | N/A | N/A | TCAACCTTTCACATTCATTT | 56 | 2114 |
| 1321687 | 25533 | 25552 | N/A | N/A | TTGGTGACCCTATTATTTAT | 15 | 2115 |
| 1321740 | 12500 | 12519 | N/A | N/A | TTTCTAATAATATCCTTTGC | 67 | 2116 |
| 1321784 | 35818 | 35837 | 3090 | 3109 | AGTGGAACATTCTTCTTCCT | 64 | 2117 |
| 1321814 | 29352 | 29371 | N/A | N/A | CTGTACTACATAAATTCTTT | 40 | 2118 |
| 1321821 | 27097 | 27116 | N/A | N/A | ACCAACAGCTAAAAGCATCT | 65 | 2119 |
| 1321881 | 25691 | 25710 | N/A | N/A | AACCACACAACACTTTGCAA | 56 | 2120 |
| 1321886 | 17618 | 17637 | N/A | N/A | ACTTCATGCCATCTTTGCCT | 61 | 2121 |
| 1321977 | 5532 | 5551 | N/A | N/A | AGGTCTACAACCTAAGTCTA | 56 | 2122 |
| 1322061 | 14141 | 14160 | N/A | N/A | TGTATGTTCATAGATAGATA | 39 | 2123 |
| 1322063 | 9388 | 9407 | N/A | N/A | GTTTTTAAATGTCCTAGTCT | 54 | 2124 |
| 1322176 | 24313 | 24332 | 888 | 907 | TTGCATATGTATAATCCCAT | 3 | 132 |
| 1322194 | 38470 | 38489 | 5742 | 5761 | CAGGCTCTATCTCCACAGGC | 54 | 2125 |
| 1322195 | 13740 | 13759 | N/A | N/A | CTGCCCCTCACACACCTGGA | 70 | 2126 |
| 1322233 | 8356 | 8375 | N/A | N/A | CATCCCCTTATCCCACTCTA | 75 | 2127 |
| 1322292 | 4847 | 4866 | N/A | N/A | GTCAAGACTCCATCTACCCA | 74 | 2128 |
| 1322295 | 28610 | 28629 | N/A | N/A | TCCCCCAAATTTTACATTCA | 73 | 2129 |
| 1322345 | 35017 | 35036 | 2289 | 2308 | CTCAACTCTTTTAATTTCTT | 9 | 2130 |
| 1322359 | 30293 | 30312 | N/A | N/A | GCAAGCACACTTAAGGCCTC | 60 | 2131 |
| 1322400 | 36186 | 36205 | 3458 | 3477 | TTTGTCTCTTTTCTTTCACT | 25 | 2132 |
| 1322439 | 30100 | 30119 | N/A | N/A | TATAAGTATTCAATAAGAGT | 46 | 2133 |
| 1322446 | 16539 | 16558 | N/A | N/A | GTTTTAGTTACAACTCGAGA | 33 | 2134 |
| 1322464 | 25253 | 25272 | N/A | N/A | CTCTACTCCTCTGCCACCAA | 48 | 2135 |
| 1322544 | 18231 | 18250 | N/A | N/A | CTATTTCTAAAAATCCAGAA | 61 | 2136 |
| 1322570 | 28227 | 28246 | 1072 | 1091 | GTGTTATTTCCATCAGATGC | 0 | 2137 |
| 1322573 | 25757 | 25776 | N/A | N/A | CCCTATTCACCTTTACATTT | 75 | 2138 |
| 1322597 | 25190 | 25209 | N/A | N/A | TTCCTTCTACTTAATTTTCC | 61 | 2139 |
| 1322606 | 19685 | 19704 | N/A | N/A | AGAGAAATAAATGACCCATA | 37 | 2140 |
| 1322619 | 24866 | 24885 | N/A | N/A | TCTGCTCAACCACATAGAAC | 66 | 2141 |
| 1322635 | 26984 | 27003 | N/A | N/A | GCATGCACCTTCCTCAAATC | 81 | 2142 |
| 1322674 | 31766 | 31785 | 1299 | 1318 | CATCAGTTTTTTTCTCGATA | 11 | 2143 |
| 1322676 | 28538 | 28557 | N/A | N/A | TACAGTCTTTTTACCTCAGC | 48 | 2144 |
| 1322742 | 11610 | 11629 | N/A | N/A | TCCTGATTCATTGAACTATC | 58 | 2145 |
| 1322761 | 16063 | 16082 | N/A | N/A | CCCAGTTAACAATATATTTA | 68 | 2146 |
| 1322768 | 20203 | 20222 | N/A | N/A | TGGTAATATTTACTAAAGAA | 59 | 2147 |
| 1322775 | 13498 | 13517 | N/A | N/A | TAAGAACATCTTAATTTCCT | 81 | 2148 |
| 1322792 | 28993 | 29012 | N/A | N/A | AGCTCACCCATAACTCTACA | 31 | 2149 |
| 1322823 | 24731 | 24750 | N/A | N/A | ACTGAGATCATTTTAAGGAC | 24 | 2150 |
| 1322832 | 32367 | 32386 | N/A | N/A | GCAAGTATCCTTCAGCACTT | 30 | 2151 |
| 1322899 | 29788 | 29807 | N/A | N/A | CCATAATTCTCAATGGGCTA | 30 | 2152 |
| 1322942 | 34481 | 34500 | 1753 | 1772 | TCTTCATTAGAATAATTTCC | 56 | 2153 |
| 1322947 | 29491 | 29510 | N/A | N/A | CCCAACTAAACAACTTTTTG | 67 | 2154 |
| 1322981 | 25868 | 25887 | N/A | N/A | ACACAGAAAACTAACATCTA | 60 | 2155 |
| 1323090 | 20012 | 20031 | 361 | 380 | CCAGACAATTTTATCCAATT | 11 | 2156 |
| 1323110 | 22598 | 22617 | 742 | 761 | GCTGCTTTAACTTTTAGACA | 34 | 2157 |
| 1323129 | 37087 | 37106 | 4359 | 4378 | GCTCCAACTTCCTAGAGACC | 58 | 2158 |
| 1323140 | 33347 | 33366 | N/A | N/A | ATTACAGACTTTATTTACTT | 59 | 2159 |
| 1323170 | 37420 | 37439 | 4692 | 4711 | CTCTAATGATACAAATCTTT | 51 | 2160 |
| 1323174 | 9713 | 9732 | N/A | N/A | TCCCACTTTTCTCTGCTCAC | 57 | 2161 |
| 1323181 | 22420 | 22439 | N/A | N/A | GTAAAAATAATGCTTACTTC | 67 | 2162 |
| 1323216 | 30785 | 30804 | N/A | N/A | ATCCCTATTTCCAAAACAAC | 64 | 2163 |
| 1323224 | 20589 | 20608 | N/A | N/A | GTTTTACATTTTTTTTCCAA | 34 | 2164 |
| 1323253 | 24307 | 24326 | 882 | 901 | ATGTATAATCCCATTTAAGA | 34 | 2165 |
| 1323275 | 7331 | 7350 | N/A | N/A | CTGGAATTCAGAAAAAGCTA | 67 | 2166 |
| 1323280 | 27416 | 27435 | N/A | N/A | ACATTTTATTTTCTAAGCTC | 51 | 2167 |
| 1323288 | 6408 | 6427 | N/A | N/A | TAACAGTATCTACACTGCTC | 72 | 2168 |
| 1323339 | 26889 | 26908 | N/A | N/A | TTGTCCCATTCTACTTATTC | 58 | 2169 |

TABLE 29
Reduction of IFNAR1 RNA by 5-10-5 MOE gapmers with mixed PO/PS internucleoside linkages
in A431 cells

| | SEQ ID | SEQ ID | SEQ ID | SEQ ID | | | |
|---|---|---|---|---|---|---|---|
| | NO 1 | NO 1 | NO 2 | NO 2 | | IFNAR1 | |
| Compound | Start | Stop | Start | Stop | | (% | SEQ ID |
| Number | Site | Site | Site | Site | Sequence (5' to 3') | UTC) | NO |
| 1320898 | 37086 | 37105 | 4358 | 4377 | CTCCAACTTCCTAGAGACCT | 59 | 2170 |
| 1320986 | 24306 | 24325 | 881 | 900 | TGTATAATCCCATTTAAGAA | 50 | 2171 |
| 1321073 | 16062 | 16081 | N/A | N/A | CCAGTTAACAATATATTTAC | 58 | 2172 |
| 1321185 | 5519 | 5538 | N/A | N/A | AAGTCTAGTTCCTAAAACTA | 66 | 2173 |
| 1321223 | 8351 | 8370 | N/A | N/A | CCTTATCCCACTCTAGAATT | 72 | 2174 |
| 1321226 | 30098 | 30117 | N/A | N/A | TAAGTATTCAATAAGAGTTT | 58 | 2175 |
| 1321231 | 20192 | 20211 | N/A | N/A | ACTAAAGAATATAATTCAGC | 72 | 2176 |
| 1321311 | 38469 | 38488 | 5741 | 5760 | AGGCTCTATCTCCACAGGCT | 57 | 2177 |
| 1321348 | 16479 | 16498 | N/A | N/A | CCGGAGGGCCTAATGCCTTA | 69 | 2178 |
| 1321395 | 33346 | 33365 | N/A | N/A | TTACAGACTTTATTTACTTA | 59 | 2179 |
| 1321478 | 31765 | 31784 | 1298 | 1317 | ATCAGTTTTTTTCTCGATAA | 47 | 2180 |
| 1321496 | 26691 | 26710 | N/A | N/A | CTCCTCTCATAATTAGGTTA | 64 | 2181 |
| 1321551 | 29488 | 29507 | N/A | N/A | AACTAAACAACTTTTTGGGC | 34 | 2182 |
| 1321632 | 37416 | 37435 | 4688 | 4707 | AATGATACAAATCTTTCATA | 68 | 2183 |
| 1321722 | 25247 | 25266 | N/A | N/A | TCCTCTGCCACCAATGTATA | 53 | 2184 |
| 1321736 | 25346 | 25365 | N/A | N/A | TACTTACACTTCCCTTCTCC | 66 | 2185 |
| 1321748 | 25755 | 25774 | N/A | N/A | CTATTCACCTTTACATTTTC | 69 | 2186 |
| 1321761 | 28537 | 28556 | N/A | N/A | ACAGTCTTTTTACCTCAGCA | 17 | 2187 |
| 1321839 | 9379 | 9398 | N/A | N/A | TGTCCTAGTCTTTAATATCC | 55 | 2188 |
| 1321876 | 27414 | 27433 | N/A | N/A | ATTTTATTTTCTAAGCTCTT | 58 | 2189 |
| 1321885 | 25690 | 25709 | N/A | N/A | ACCACACAACACTTTGCAAT | 55 | 2190 |
| 1321901 | 8807 | 8826 | N/A | N/A | TGCAAGTTCCTTAAGGGCAG | 60 | 2191 |
| 1321912 | 4846 | 4865 | N/A | N/A | TCAAGACTCCATCTACCCAG | 76 | 2192 |
| 1322014 | 35424 | 35443 | 2696 | 2715 | TAGGGATCATCTTTCTGGCA | 24 | 2193 |
| 1322039 | 6407 | 6426 | N/A | N/A | AACAGTATCTACACTGCTCT | 71 | 2194 |
| 1322058 | 36182 | 36201 | 3454 | 3473 | TCTCTTTTCTTTCACTGGTC | 17 | 2195 |
| 1322067 | 14114 | 14133 | N/A | N/A | TTCTTGACTTACAATGGTGT | 66 | 2196 |
| 1322137 | 33622 | 33641 | N/A | N/A | TAGGCCTTCACCATTCAGTG | 64 | 2197 |
| 1322159 | 30285 | 30304 | N/A | N/A | ACTTAAGGCCTCTGTTCTCA | 42 | 2198 |
| 1322176 | 24313 | 24332 | 888 | 907 | TTGCATATGTATAATCCCAT | 8 | 132 |
| 1322183 | 22597 | 22616 | 741 | 760 | CTGCTTTAACTTTTAGACAA | 6 | 2199 |
| 1322209 | 13738 | 13757 | N/A | N/A | GCCCCTCACACACCTGGATC | 75 | 2200 |
| 1322210 | 25144 | 25163 | N/A | N/A | ACAATTTTCCAATCAATATA | 74 | 2201 |
| 1322244 | 11574 | 11593 | N/A | N/A | TTGTTGAGTTTCCTTAAGAT | 85 | 2202 |
| 1322311 | 9707 | 9726 | N/A | N/A | TTTTCTCTGCTCACTAGGAT | 56 | 2203 |
| 1322331 | 19640 | 19659 | N/A | N/A | GCTCTGTTAAAAATAGCTGT | 61 | 2204 |
| 1322358 | 11009 | 11028 | N/A | N/A | ATCTCACAAACCTACTGAGA | 70 | 2205 |
| 1322417 | 12499 | 12518 | N/A | N/A | TTCTAATAATATCCTTTGCC | 59 | 2206 |
| 1322437 | 5922 | 5941 | N/A | N/A | CTCACTACAAAATTACCTCT | 67 | 2207 |
| 1322472 | 30784 | 30803 | N/A | N/A | TCCCTATTTCCAAAACAACC | 57 | 2208 |
| 1322538 | 38145 | 38164 | 5417 | 5436 | ACACTGCCACAAACACCCTC | 48 | 2209 |
| 1322543 | 32359 | 32378 | N/A | N/A | CCTTCAGCACTTTTACACCA | 43 | 2210 |
| 1322557 | 8626 | 8645 | N/A | N/A | ATATTTCTTTTACTTCTGCC | 49 | 2211 |
| 1322567 | 26888 | 26907 | N/A | N/A | TGTCCCATTCTACTTATTCA | 59 | 2212 |
| 1322605 | N/A | N/A | 670 | 689 | TCAATCCTTTCTTCTACACC | 45 | 2213 |
| 1322672 | 27871 | 27890 | N/A | N/A | GGTGGCTCATATCAATATGC | 28 | 2214 |
| 1322677 | 28226 | 28245 | 1071 | 1090 | TGTTATTTCCATCAGATGCT | 24 | 2215 |
| 1322681 | 24729 | 24748 | N/A | N/A | TGAGATCATTTTAAGGACTC | 42 | 2216 |
| 1322697 | 29968 | 29987 | N/A | N/A | ACTTCCTTTTAAACCTTATA | 23 | 2217 |
| 1322722 | 28989 | 29008 | N/A | N/A | CACCCATAACTCTACAGTGC | 56 | 2218 |
| 1322741 | 18212 | 18231 | N/A | N/A | AACTCTCATTATAAACAGAA | 58 | 2219 |
| 1322745 | 26983 | 27002 | N/A | N/A | CATGCACCTTCCTCAAATCC | 59 | 2220 |
| 1322815 | 17617 | 17636 | N/A | N/A | CTTCATGCCATCTTTGCCTC | 67 | 2221 |
| 1322838 | 23231 | 23250 | N/A | N/A | ACTCATAGTTCAGCTACCTC | 49 | 2222 |
| 1322845 | 34479 | 34498 | 1751 | 1770 | TTCATTAGAATAATTTCCTG | 53 | 2223 |
| 1322852 | N/A | N/A | 218 | 237 | TAGATTTTTTCCACCTGCGG | 35 | 2224 |
| 1322861 | 18534 | 18553 | N/A | N/A | TCAAGCCTAATTCATTAGCT | 54 | 2225 |
| 1322882 | 35667 | 35686 | 2939 | 2958 | TTGTACACACTCTCAGATCT | 63 | 2226 |
| 1322902 | 25867 | 25886 | N/A | N/A | CACAGAAAACTAACATCTAA | 80 | 2227 |
| 1322908 | 7315 | 7334 | N/A | N/A | GCTAACCACCATTAACAACA | 55 | 2228 |
| 1322987 | 28609 | 28628 | N/A | N/A | CCCCCAAATTTTACATTCAA | 93 | 2229 |
| 1323006 | 21952 | 21971 | N/A | N/A | TGATGACCACATCTATGCTA | 52 | 2230 |
| 1323010 | 20008 | 20027 | 357 | 376 | ACAATTTTATCCAATTATCC | 48 | 2231 |
| 1323012 | 31313 | 31332 | N/A | N/A | TGAGAAATATAAATTTGTTT | 79 | 2232 |
| 1323023 | 33952 | 33971 | N/A | N/A | TATCCAACACATATATATCC | 64 | 2233 |
| 1323039 | 27090 | 27109 | N/A | N/A | GCTAAAAGCATCTCAGTTCA | 43 | 2234 |
| 1323052 | 29336 | 29355 | N/A | N/A | CTTTTGTCCCATAAGAACCA | 40 | 2235 |
| 1323087 | 13497 | 13516 | N/A | N/A | AAGAACATCTTAATTTCCTT | 67 | 2236 |
| 1323097 | 35016 | 35035 | 2288 | 2307 | TCAACTCTTTTAATTTCTTT | 24 | 2237 |
| 1323104 | 25189 | 25208 | N/A | N/A | TCCTTCTACTTAATTTTCCT | 40 | 2238 |
| 1323154 | 24865 | 24884 | N/A | N/A | CTGCTCAACCACATAGAACA | 72 | 2239 |
| 1323173 | 20539 | 20558 | N/A | N/A | GCAGATGAATTTCACATTGA | 11 | 2240 |
| 1323182 | 31104 | 31123 | N/A | N/A | AGAGTATCACTTACAGCTGT | 51 | 2241 |
| 1323187 | 25532 | 25551 | N/A | N/A | TGGTGACCCTATTATTTATT | 12 | 2242 |
| 1323225 | 35817 | 35836 | 3089 | 3108 | GTGGAACATTCTTCTTCCTC | 65 | 2243 |
| 1323316 | 12100 | 12119 | N/A | N/A | TTGATGCCTTTCTCTTGCTA | 62 | 2244 |
| 1323327 | 29779 | 29798 | N/A | N/A | TCAATGGGCTACATTAAGCT | 42 | 2245 |
| 1323341 | 7778 | 7797 | N/A | N/A | ACCTTTCACATTCATTTTCA | 62 | 2246 |

TABLE 30
Reduction of IFNAR1 RNA by 5-10-5 MOE gapmers with mixed PO/PS internucleoside linkages
in A431 cells

| | SEQ ID | SEQ ID | SEQ ID | SEQ ID | | | |
|---|---|---|---|---|---|---|---|
| | NO 1 | NO 1 | NO 2 | NO 2 | | IFNAR1 | |
| Compound | Start | Stop | Start | Stop | | (% | SEQ ID |
| Number | Site | Site | Site | Site | Sequence (5' to 3') | UTC) | NO |
| 1320886 | 35664 | 35683 | 2936 | 2955 | TACACACTCTCAGATCTTAA | 39 | 2247 |
| 1320890 | 37076 | 37095 | 4348 | 4367 | CTAGAGACCTAACAATTTCA | 79 | 2248 |
| 1320915 | 30783 | 30802 | N/A | N/A | CCCTATTTCCAAAACAACCA | 99 | 2249 |
| 1320944 | 35816 | 35835 | 3088 | 3107 | TGGAACATTCTTCTTCCTCT | 91 | 2250 |
| 1320960 | 19594 | 19613 | N/A | N/A | TTCTGGATCTTATCTTCCTT | 97 | 2251 |
| 1320962 | 6361 | 6380 | N/A | N/A | AAACACTTAGATTACTGCCT | 71 | 2252 |
| 1321177 | 25531 | 25550 | N/A | N/A | GGTGACCCTATTATTTATTC | 28 | 2253 |
| 1321218 | 25865 | 25884 | N/A | N/A | CAGAAAACTAACATCTAATA | 98 | 2254 |
| 1321252 | 12046 | 12065 | N/A | N/A | CAACAGATAATAATGTGCTT | 73 | 2255 |
| 1321297 | N/A | N/A | 216 | 235 | GATTTTTTCCACCTGCGGCT | 55 | 2256 |
| 1321315 | 34719 | 34738 | 1991 | 2010 | GGCCTGTAATTTCATTTTTA | 106 | 2257 |
| 1321362 | 36181 | 36200 | 3453 | 3472 | CTCTTTTCTTTCACTGGTCC | 36 | 2258 |
| 1321370 | 22413 | 22432 | N/A | N/A | TAATGCTTACTTCTACACCT | 84 | 2259 |
| 1321384 | 5921 | 5940 | N/A | N/A | TCACTACAAAATTACCTCTC | 100 | 2260 |
| 1321413 | 9677 | 9696 | N/A | N/A | TCTTTGATGCACTCTAGCAC | 89 | 2261 |
| 1321467 | 18174 | 18193 | N/A | N/A | AAACTTAATATAATTTCAAC | 94 | 2262 |
| 1321592 | 24305 | 24324 | 880 | 899 | GTATAATCCCATTTAAGAAC | 26 | 2263 |
| 1321593 | N/A | N/A | 1284 | 1303 | CGATAATTTTTCTCTCAGCA | 39 | 2264 |
| 1321621 | 28195 | 28214 | 1040 | 1059 | AAGGTAAATTCCTTTTTGGA | 58 | 2265 |
| 1321727 | 9377 | 9396 | N/A | N/A | TCCTAGTCTTTAATATCCGG | 73 | 2266 |
| 1321751 | 20538 | 20557 | N/A | N/A | CAGATGAATTTCACATTGAA | 40 | 2267 |
| 1321760 | 33951 | 33970 | N/A | N/A | ATCCAACACATATATATCCA | 49 | 2268 |
| 1321765 | 27076 | 27095 | N/A | N/A | AGTTCAAGCCCAGAACTCTA | 92 | 2269 |
| 1321913 | 7312 | 7331 | N/A | N/A | AACCACCATTAACAACAACA | 86 | 2270 |
| 1321940 | 34475 | 34494 | 1747 | 1766 | TTAGAATAATTTCCTGAATC | 81 | 2271 |
| 1321946 | 29967 | 29986 | N/A | N/A | CTTCCTTTTAAACCTTATAA | 67 | 2272 |
| 1321955 | 8347 | 8366 | N/A | N/A | ATCCCACTCTAGAATTCTTA | 88 | 2273 |
| 1321965 | 30272 | 30291 | N/A | N/A | GTTCTCAGCACATCTACTTG | 64 | 2274 |
| 1322006 | 31758 | 31777 | 1291 | 1310 | TTTTTCTCGATAATTTTTCT | 53 | 2275 |
| 1322078 | 30089 | 30108 | N/A | N/A | AATAAGAGTTTCTATAGTAA | 93 | 2276 |
| 1322079 | 16061 | 16080 | N/A | N/A | CAGTTAACAATATATTTACA | 94 | 2277 |
| 1322097 | 8624 | 8643 | N/A | N/A | ATTTCTTTTACTTCTGCCTT | 74 | 2278 |
| 1322101 | 37407 | 37426 | 4679 | 4698 | AATCTTTCATATAAATTCTT | 89 | 2279 |
| 1322167 | 18533 | 18552 | N/A | N/A | CAAGCCTAATTCATTAGCTG | 80 | 2280 |
| 1322176 | 24313 | 24332 | 888 | 907 | TTGCATATGTATAATCCCAT | 9 | 132 |
| 1322278 | 21405 | 21424 | N/A | N/A | CCCCACTTTTTTTTGAGATA | 102 | 2281 |
| 1322298 | 13737 | 13756 | N/A | N/A | CCCCTCACACACCTGGATCA | 97 | 2282 |
| 1322299 | 26982 | 27001 | N/A | N/A | ATGCACCTTCCTCAAATCCA | 65 | 2283 |
| 1322339 | 29335 | 29354 | N/A | N/A | TTTTGTCCCATAAGAACCAA | 77 | 2284 |
| 1322343 | 33619 | 33638 | N/A | N/A | GCCTTCACCATTCAGTGCTT | 83 | 2285 |
| 1322357 | 25666 | 25685 | N/A | N/A | GCTAACTGCTTTCAATTTTT | 52 | 2286 |
| 1322396 | 24728 | 24747 | N/A | N/A | GAGATCATTTTAAGGACTCA | 63 | 2287 |
| 1322455 | 25345 | 25364 | N/A | N/A | ACTTACACTTCCCTTCTCCC | 72 | 2288 |
| 1322495 | 38468 | 38487 | 5740 | 5759 | GGCTCTATCTCCACAGGCTC | 109 | 2289 |
| 1322539 | 20176 | 20195 | N/A | N/A | CAGCTAGCAACTTTTTCTTA | 86 | 2290 |
| 1322565 | 23224 | 23243 | N/A | N/A | GTTCAGCTACCTCCTGCTTC | 93 | 2291 |
| 1322581 | 26886 | 26905 | N/A | N/A | TCCCATTCTACTTATTCAGC | 65 | 2292 |
| 1322598 | 13496 | 13515 | N/A | N/A | AGAACATCTTAATTTCCTTA | 68 | 2293 |
| 1322631 | 17558 | 17577 | N/A | N/A | TTGGCATGAAATATATTCAA | 93 | 2294 |
| 1322651 | 22565 | 22584 | 709 | 728 | GGTGAGAGTTTATAAATTTT | 2 | 2295 |
| 1322658 | 31082 | 31101 | N/A | N/A | GGTCTTGCAAGCATTATTTA | 21 | 2296 |
| 1322687 | 8795 | 8814 | N/A | N/A | AAGGGCAGAATTTATATCGC | 46 | 2297 |
| 1322743 | 16472 | 16491 | N/A | N/A | GCCTAATGCCTTATTTCTTC | 74 | 2298 |
| 1322744 | 25143 | 25162 | N/A | N/A | CAATTTTCCAATCAATATAA | 100 | 2299 |
| 1322754 | 25238 | 25257 | N/A | N/A | ACCAATGTATATCTTTCTTT | 57 | 2300 |
| 1322764 | 11572 | 11591 | N/A | N/A | GTTGAGTTTCCTTAAGATCA | 84 | 2301 |
| 1322778 | 4841 | 4860 | N/A | N/A | ACTCCATCTACCCAGAGGCA | 79 | 2302 |
| 1322884 | 29487 | 29506 | N/A | N/A | ACTAAACAACTTTTTGGGCA | 33 | 2303 |
| 1322887 | 20004 | 20023 | 353 | 372 | TTTTATCCAATTATCCATCC | 57 | 2304 |
| 1322923 | 35423 | 35442 | 2695 | 2714 | AGGGATCATCTTTCTGGCAT | 29 | 2305 |
| 1322944 | 25754 | 25773 | N/A | N/A | TATTCACCTTTACATTTTCA | 88 | 2306 |
| 1322953 | 38140 | 38159 | 5412 | 5431 | GCCACAAACACCCTCAGGTT | 80 | 2307 |
| 1322978 | 28988 | 29007 | N/A | N/A | ACCCATAACTCTACAGTGCA | 43 | 2308 |
| 1322984 | 14052 | 14071 | N/A | N/A | GCTGGCTTCCTCCCTGCAGT | 102 | 2309 |
| 1323009 | 28607 | 28626 | N/A | N/A | CCCAAATTTTACATTCAAGC | 79 | 2310 |
| 1323036 | 25188 | 25207 | N/A | N/A | CCTTCTACTTAATTTTCCTC | 69 | 2311 |
| 1323069 | 11008 | 11027 | N/A | N/A | TCTCACAAACCTACTGAGAC | 89 | 2312 |
| 1323114 | 31296 | 31315 | N/A | N/A | TTTTAGATACACCACTATAA | 76 | 2313 |
| 1323123 | 29777 | 29796 | N/A | N/A | AATGGGCTACATTAAGCTAT | 69 | 2314 |
| 1323161 | 27870 | 27889 | N/A | N/A | GTGGCTCATATCAATATGCA | 64 | 2315 |
| 1323166 | 12498 | 12517 | N/A | N/A | TCTAATAATATCCTTTGCCC | 87 | 2316 |
| 1323206 | 5183 | 5202 | N/A | N/A | AAATGTCTTCCCATATTTTG | 77 | 2317 |
| | 7685 | 7704 | | | | | |
| 1323210 | 24864 | 24883 | N/A | N/A | TGCTCAACCACATAGAACAT | 97 | 2318 |
| 1323220 | 33046 | 33065 | N/A | N/A | TGGCCAAGAATCACAGGCTT | 99 | 2319 |
| 1323273 | 32357 | 32376 | N/A | N/A | TTCAGCACTTTTACACCATA | 53 | 2320 |
| 1323301 | 7777 | 7796 | N/A | N/A | CCTTTCACATTCATTTTCAC | 90 | 2321 |
| 1323323 | 27393 | 27412 | N/A | N/A | GGGCTATCTTTATCTATTGT | 52 | 2322 |
| 1323348 | 26680 | 26699 | N/A | N/A | ATTAGGTTACATTAAGTGGC | 24 | 2323 |

TABLE 31
Reduction of IFNAR1 RNA by 5-10-5 MOE gapmers with mixed PO/PS internucleoside linkages
in A431 cells

| | SEQ ID | SEQ ID | SEQ ID | SEQ ID | | | |
|---|---|---|---|---|---|---|---|
| | NO 1 | NO 1 | NO 2 | NO 2 | | IFNAR1 | |
| Compound | Start | Stop | Start | Stop | | (% | SEQ ID |
| Number | Site | Site | Site | Site | Sequence (5' to 3') | UTC) | NO |
| 1320973 | 24304 | 24323 | 879 | 898 | TATAATCCCATTTAAGAACA | 75 | 2324 |
| 1320978 | 27075 | 27094 | N/A | N/A | GTTCAAGCCCAGAACTCTAA | 73 | 2325 |
| 1320980 | 21126 | 21145 | N/A | N/A | TGGGCCACTACACTCAGCTC | 98 | 2326 |
| 1321014 | 34440 | 34459 | 1712 | 1731 | ACTGTATTTTTTATGATCTT | 49 | 2327 |
| 1321170 | 25664 | 25683 | N/A | N/A | TAACTGCTTTCAATTTTTGA | 83 | 2328 |
| 1321222 | 16466 | 16485 | N/A | N/A | TGCCTTATTTCTTCATTGCC | 84 | 2329 |
| 1321234 | 24698 | 24717 | N/A | N/A | GAGTTCTTAGAAAAAGATCA | 61 | 2330 |
| 1321251 | 28194 | 28213 | 1039 | 1058 | AGGTAAATTCCTTTTTGGAA | 40 | 2331 |
| 1321270 | 25344 | 25363 | N/A | N/A | CTTACACTTCCCTTCTCCCT | 73 | 2332 |
| 1321364 | 28987 | 29006 | N/A | N/A | CCCATAACTCTACAGTGCAA | 54 | 2333 |
| 1321374 | 20002 | 20021 | 351 | 370 | TTATCCAATTATCCATCCCA | 43 | 2334 |
| 1321379 | 4827 | 4846 | N/A | N/A | GAGGCATCTGCATAACTGAC | 60 | 2335 |
| 1321415 | 31295 | 31314 | N/A | N/A | TTTAGATACACCACTATAAC | 73 | 2336 |
| 1321420 | 38417 | 38436 | 5689 | 5708 | AGGATGCTCAACCCTGGGCT | 85 | 2337 |
| 1321424 | 33606 | 33625 | N/A | N/A | AGTGCTTTCATTTAATATGC | 54 | 2338 |
| 1321432 | 18171 | 18190 | N/A | N/A | CTTAATATAATTTCAACCCA | 97 | 2339 |
| 1321522 | 18530 | 18549 | N/A | N/A | GCCTAATTCATTAGCTGATT | 50 | 2340 |
| 1321534 | 29746 | 29765 | N/A | N/A | TGTCAGACAATTAAAAAGGG | 40 | 2341 |
| 1321577 | 34718 | 34737 | 1990 | 2009 | GCCTGTAATTTCATTTTTAA | 84 | 2342 |
| 1321626 | 13493 | 13512 | N/A | N/A | ACATCTTAATTTCCTTATGC | 77 | 2343 |
| 1321633 | 16060 | 16079 | N/A | N/A | AGTTAACAATATATTTACAA | 103 | 2344 |
| 1321673 | 7311 | 7330 | N/A | N/A | ACCACCATTAACAACAACAC | 91 | 2345 |
| 1321683 | 37075 | 37094 | 4347 | 4366 | TAGAGACCTAACAATTTCAC | 85 | 2346 |
| 1321691 | 4050 | 4069 | 142 | 161 | AGGACGACCATCATCTGGGA | 63 | 2347 |
| 1321735 | 14026 | 14045 | N/A | N/A | TGTGGTGACATCATCACAAA | 106 | 2348 |
| 1321788 | 33037 | 33056 | N/A | N/A | ATCACAGGCTTTAAACGGTA | 37 | 2349 |
| 1321825 | 26679 | 26698 | N/A | N/A | TTAGGTTACATTAAGTGGCA | 51 | 2350 |
| 1321832 | 26981 | 27000 | N/A | N/A | TGCACCTTCCTCAAATCCAG | 58 | 2351 |
| 1321833 | 25141 | 25160 | N/A | N/A | ATTTTCCAATCAATATAAAC | 105 | 2352 |
| 1321846 | 32356 | 32375 | N/A | N/A | TCAGCACTTTTACACCATAC | 30 | 2353 |
| 1321878 | 20528 | 20547 | N/A | N/A | TCACATTGAATTCTATGTTA | 39 | 2354 |
| 1321902 | 9676 | 9695 | N/A | N/A | CTTTGATGCACTCTAGCACT | 70 | 2355 |
| 1321916 | 5182 | 5201 | N/A | N/A | AATGTCTTCCCATATTTTGG | 49 | 2356 |
| | 7684 | 7703 | | | | | |
| 1321920 | 19593 | 19612 | N/A | N/A | TCTGGATCTTATCTTCCTTA | 76 | 2357 |
| 1321929 | 31079 | 31098 | N/A | N/A | CTTGCAAGCATTATTTAATT | 64 | 2358 |
| 1321962 | 25862 | 25881 | N/A | N/A | AAAACTAACATCTAATAGTT | 95 | 2359 |
| 1322027 | 30269 | 30288 | N/A | N/A | CTCAGCACATCTACTTGGGC | 82 | 2360 |
| 1322038 | 8551 | 8570 | N/A | N/A | TAGAACTTTCTTAACTGAGA | 82 | 2361 |
| 1322049 | 29476 | 29495 | N/A | N/A | TTTTGGGCAATTTTTTCCTA | 51 | 2362 |
| 1322115 | 25187 | 25206 | N/A | N/A | CTTCTACTTAATTTTCCTCT | 68 | 2363 |
| 1322145 | 37406 | 37425 | 4678 | 4697 | ATCTTTCATATAAATTCTTA | 85 | 2364 |
| 1322168 | 36125 | 36144 | 3397 | 3416 | GCCACCAGAATTCCCAGACT | 68 | 2365 |
| 1322174 | 5920 | 5939 | N/A | N/A | CACTACAAAATTACCTCTCA | 91 | 2366 |
| 1322176 | 24313 | 24332 | 888 | 907 | TTGCATATGTATAATCCCAT | 3 | 132 |
| 1322205 | 27392 | 27411 | N/A | N/A | GGCTATCTTTATCTATTGTA | 42 | 2367 |
| 1322277 | 12487 | 12506 | N/A | N/A | CCTTTGCCCCTTTCTTCCTC | 85 | 2368 |
| 1322285 | 24863 | 24882 | N/A | N/A | GCTCAACCACATAGAACATA | 60 | 2369 |
| 1322287 | 29966 | 29985 | N/A | N/A | TTCCTTTTAAACCTTATAAA | 101 | 2370 |
| 1322300 | 22560 | 22579 | 704 | 723 | GAGTTTATAAATTTTATGTC | 58 | 2371 |
| 1322305 | 23175 | 23194 | N/A | N/A | GTCATTACAAAATATTTGAA | 60 | 2372 |
| 1322307 | 26885 | 26904 | N/A | N/A | CCCATTCTACTTATTCAGCT | 50 | 2373 |
| 1322367 | 7774 | 7793 | N/A | N/A | TTCACATTCATTTTCACGAC | 27 | 2374 |
| 1322451 | 35402 | 35421 | 2674 | 2693 | TGCAGCTGTTTTCTAGGGTA | 30 | 2375 |
| 1322457 | 27869 | 27888 | N/A | N/A | TGGCTCATATCAATATGCAA | 62 | 2376 |
| 1322462 | 12025 | 12044 | N/A | N/A | GGAGAGAACCTTTTTGGGTT | 81 | 2377 |
| 1322475 | 31755 | 31774 | N/A | N/A | TTCTCGATAATTTTTCTCTA | 46 | 2378 |
| 1322627 | 6357 | 6376 | N/A | N/A | ACTTAGATTACTGCCTGGCA | 100 | 2379 |
| 1322662 | 22411 | 22430 | N/A | N/A | ATGCTTACTICTACACCTGA | 73 | 2380 |
| 1322667 | 11007 | 11026 | N/A | N/A | CTCACAAACCTACTGAGACA | 100 | 2381 |
| 1322684 | 24245 | 24264 | 820 | 839 | GGAGGTAGTTCATTTTCAAC | 17 | 2382 |
| 1322702 | 25753 | 25772 | N/A | N/A | ATTCACCTTTACATTTTCAA | 73 | 2383 |
| 1322705 | 25235 | 25254 | N/A | N/A | AATGTATATCTTTCTTTCCA | 56 | 2384 |
| 1322756 | 28536 | 28555 | N/A | N/A | CAGTCTTTTTACCTCAGCAT | 41 | 2385 |
| 1322774 | 17557 | 17576 | N/A | N/A | TGGCATGAAATATATTCAAT | 73 | 2386 |
| 1322822 | 30088 | 30107 | N/A | N/A | ATAAGAGTTTCTATAGTAAC | 61 | 2387 |
| 1322859 | 30782 | 30801 | N/A | N/A | CCTATTTCCAAAACAACCAC | 91 | 2388 |
| 1322872 | 8343 | 8362 | N/A | N/A | CACTCTAGAATTCTTAACTT | 93 | 2389 |
| 1322878 | 33948 | 33967 | N/A | N/A | CAACACATATATATCCAGAA | 44 | 2390 |
| 1322910 | 29328 | 29347 | N/A | N/A | CCATAAGAACCAATTTTTGT | 95 | 2391 |
| 1322911 | 8794 | 8813 | N/A | N/A | AGGGCAGAATTTATATCGCT | 78 | 2392 |
| 1322919 | 13736 | 13755 | N/A | N/A | CCCTCACACACCTGGATCAC | 91 | 2393 |
| 1322976 | 25530 | 25549 | N/A | N/A | GTGACCCTATTATTTATTCA | 42 | 2394 |
| 1323033 | 35815 | 35834 | 3087 | 3106 | GGAACATTCTTCTTCCTCTT | 44 | 2395 |
| 1323107 | 9376 | 9395 | N/A | N/A | CCTAGTCTTTAATATCCGGC | 91 | 2396 |
| 1323113 | 28606 | 28625 | N/A | N/A | CCAAATTTTACATTCAAGCT | 82 | 2397 |
| 1323203 | 11552 | 11571 | N/A | N/A | TTAGTTTGAATTCCTTTTCC | 87 | 2398 |
| 1323221 | 35657 | 35676 | 2929 | 2948 | TCTCAGATCTTAAAATACAA | 68 | 2399 |
| 1323265 | 38139 | 38158 | 5411 | 5430 | CCACAAACACCCTCAGGTTC | 82 | 2400 |

TABLE 32
Reduction of IFNAR1 RNA by 5-10-5 MOE gapmers with mixed PO/PS internucleoside linkages
in A431 cells

| | SEQ ID | SEQ ID | SEQ ID | SEQ ID | | | |
|---|---|---|---|---|---|---|---|
| | NO 1 | NO 1 | NO 2 | NO 2 | | IFNAR1 | |
| Compound | Start | Stop | Start | Stop | | (% | SEQ ID |
| Number | Site | Site | Site | Site | Sequence (5' to 3') | UTC) | NO |
| 1320938 | 29327 | 29346 | N/A | N/A | CATAAGAACCAATTTTTGTC | 109 | 2401 |
| 1320949 | 27070 | 27089 | N/A | N/A | AGCCCAGAACTCTAATAGCC | 81 | 2402 |
| 1320972 | 8550 | 8569 | N/A | N/A | AGAACTTTCTTAACTGAGAC | 95 | 2403 |
| 1321018 | 22391 | 22410 | 647 | 666 | AGAGTTTTTCCAGATAACTA | 108 | 2404 |
| 1321021 | 34712 | 34731 | 1984 | 2003 | AATTTCATTTTTAAATAGTT | 108 | 2405 |
| 1321027 | 9375 | 9394 | N/A | N/A | CTAGTCTTTAATATCCGGCT | 80 | 2406 |
| 1321046 | 25752 | 25771 | N/A | N/A | TTCACCTTTACATTTTCAAT | 67 | 2407 |
| 1321149 | 32355 | 32374 | N/A | N/A | CAGCACTTTTACACCATACA | 32 | 2408 |
| 1321178 | 3964 | 3983 | 56 | 75 | TCCTAAGTCACACCGCCCCT | 89 | 2409 |
| 1321195 | 23174 | 23193 | N/A | N/A | TCATTACAAAATATTTGAAC | 28 | 2410 |
| 1321213 | 29965 | 29984 | N/A | N/A | TCCTTTTAAACCTTATAAAC | 92 | 2411 |
| 1321215 | 25139 | 25158 | N/A | N/A | TTTCCAATCAATATAAACTA | 159 | 2412 |
| 1321240 | 11999 | 12018 | N/A | N/A | ATTTGGGAATCATTGAGCTT | 87 | 2413 |
| 1321295 | N/A | N/A | 1283 | 1302 | GATAATTTTTCTCTCAGCAT | 62 | 2414 |
| 1321367 | 37402 | 37421 | 4674 | 4693 | TTCATATAAATTCTTAGATT | 113 | 2415 |
| 1321422 | 24651 | 24670 | N/A | N/A | GGGAAATAACACATGCAACT | 37 | 2416 |
| 1321428 | 31752 | 31771 | N/A | N/A | TCGATAATTTTTCTCTAGAA | 60 | 2417 |
| 1321431 | 21125 | 21144 | N/A | N/A | GGGCCACTACACTCAGCTCC | 53 | 2418 |
| 1321436 | 35812 | 35831 | 3084 | 3103 | ACATTCTTCTTCCTCTTGCA | 45 | 2419 |
| 1321448 | 38116 | 38135 | 5388 | 5407 | GTTTAGATTTCATTCATTCA | 192 | 2420 |
| 1321494 | 30086 | 30105 | N/A | N/A | AAGAGTTTCTATAGTAACAA | 70 | 2421 |
| 1321518 | 7310 | 7329 | N/A | N/A | CCACCATTAACAACAACACA | 95 | 2422 |
| 1321545 | 26980 | 26999 | N/A | N/A | GCACCTTCCTCAAATCCAGA | 41 | 2423 |
| 1321548 | 10780 | 10799 | N/A | N/A | GGTATGGTTTTAATTTGGGA | 37 | 2424 |
| 1321552 | 28986 | 29005 | N/A | N/A | CCATAACTCTACAGTGCAAA | 33 | 2425 |
| 1321565 | 31294 | 31313 | N/A | N/A | TTAGATACACCACTATAACC | 91 | 2426 |
| 1321582 | 20517 | 20536 | N/A | N/A | TCTATGTTAAATCAGTGACC | 55 | 2427 |
| 1321679 | 7772 | 7791 | N/A | N/A | CACATTCATTTTCACGACCA | 46 | 2428 |
| 1321684 | 33605 | 33624 | N/A | N/A | GTGCTTTCATTTAATATGCT | 75 | 2429 |
| 1321730 | 17556 | 17575 | N/A | N/A | GGCATGAAATATATTCAATA | 79 | 2430 |
| 1321836 | 31078 | 31097 | N/A | N/A | TTGCAAGCATTATTTAATTT | 77 | 2431 |
| 1321862 | 25861 | 25880 | N/A | N/A | AAACTAACATCTAATAGTTG | 103 | 2432 |
| 1321914 | 24303 | 24322 | 878 | 897 | ATAATCCCATTTAAGAACAT | 72 | 2433 |
| 1321943 | 20000 | 20019 | 349 | 368 | ATCCAATTATCCATCCCAGT | 7 | 2434 |
| 1321954 | 20172 | 20191 | N/A | N/A | TAGCAACTTTTTCTTACCTT | 77 | 2435 |
| 1322025 | 35655 | 35674 | 2927 | 2946 | TCAGATCTTAAAATACAACA | 72 | 2436 |
| 1322029 | 32970 | 32989 | N/A | N/A | TAAGGACAATCATTACTATC | 79 | 2437 |
| 1322034 | 25343 | 25362 | N/A | N/A | TTACACTTCCCTTCTCCCTC | 96 | 2438 |
| 1322041 | 13729 | 13748 | N/A | N/A | ACACCTGGATCACCCTGCGC | 113 | 2439 |
| 1322096 | 22559 | 22578 | 703 | 722 | AGTTTATAAATTTTATGTCT | 46 | 2440 |
| 1322098 | 28193 | 28212 | 1038 | 1057 | GGTAAATTCCTTTTTGGAAA | 21 | 2441 |
| 1322162 | 14025 | 14044 | N/A | N/A | GTGGTGACATCATCACAAAT | 119 | 2442 |
| 1322176 | 24313 | 24332 | 888 | 907 | TTGCATATGTATAATCCCAT | 6 | 132 |
| 1322187 | 16465 | 16484 | N/A | N/A | GCCTTATTTCTTCATTGCCT | 9 | 2443 |
| 1322198 | 29745 | 29764 | N/A | N/A | GTCAGACAATTAAAAAGGGA | 37 | 2444 |
| 1322269 | 33946 | 33965 | N/A | N/A | ACACATATATATCCAGAAGA | 61 | 2445 |
| 1322272 | 18167 | 18186 | N/A | N/A | ATATAATTTCAACCCAACCT | 0 | 2446 |
| 1322279 | 16059 | 16078 | N/A | N/A | GTTAACAATATATTTACAAA | 116 | 2447 |
| 1322366 | 6306 | 6325 | N/A | N/A | CTATAAATTATATCTTGCCA | 57 | 2448 |
| 1322373 | 26654 | 26673 | N/A | N/A | GAAGGTATTTCACAGATGTA | 27 | 2449 |
| 1322394 | 8793 | 8812 | N/A | N/A | GGGCAGAATTTATATCGCTT | 81 | 2450 |
| 1322429 | 34411 | 34430 | 1683 | 1702 | GATTAGTTTCTTCTACTGTA | 45 | 2451 |
| 1322443 | 5917 | 5936 | N/A | N/A | TACAAAATTACCTCTCACTC | 104 | 2452 |
| 1322526 | 29475 | 29494 | N/A | N/A | TTTGGGCAATTTTTTCCTAA | 83 | 2453 |
| 1322546 | 8339 | 8358 | N/A | N/A | CTAGAATTCTTAACTTGGTT | 67 | 2454 |
| 1322562 | 4825 | 4844 | N/A | N/A | GGCATCTGCATAACTGACTC | 57 | 2455 |
| 1322568 | 25186 | 25205 | N/A | N/A | TTCTACTTAATTTTCCTCTT | 75 | 2456 |
| 1322612 | 28605 | 28624 | N/A | N/A | CAAATTTTACATTCAAGCTT | 98 | 2457 |
| 1322617 | 37074 | 37093 | 4346 | 4365 | AGAGACCTAACAATTTCACT | 79 | 2458 |
| 1322653 | 5181 | 5200 | N/A | N/A | ATGTCTTCCCATATTTTGGA | 26 | 2459 |
| | 7683 | 7702 | | | | | |
| 1322656 | 38375 | 38394 | 5647 | 5666 | CAGCTCTTCCATGATGAATA | 87 | 2460 |
| 1322797 | 18488 | 18507 | N/A | N/A | AGATGCCATTTTAAAGACGA | 69 | 2461 |
| 1322811 | 27388 | 27407 | N/A | N/A | ATCTTTATCTATTGTAGCTA | 101 | 2462 |
| 1322830 | 11549 | 11568 | N/A | N/A | GTTTGAATTCCTTTTCCAGC | 72 | 2463 |
| 1322856 | 9668 | 9687 | N/A | N/A | CACTCTAGCACTCTTAGTTA | 96 | 2464 |
| 1322891 | 35401 | 35420 | 2673 | 2692 | GCAGCTGTTTTCTAGGGTAA | 33 | 2465 |
| 1322951 | 30268 | 30287 | N/A | N/A | TCAGCACATCTACTTGGGCT | 86 | 2466 |
| 1322971 | 19589 | 19608 | N/A | N/A | GATCTTATCTTCCTTATTGA | 79 | 2467 |
| 1323005 | 26884 | 26903 | N/A | N/A | CCATTCTACTTATTCAGCTT | 52 | 2468 |
| 1323011 | 12482 | 12501 | N/A | N/A | GCCCCTTTCTTCCTCTCTTA | 103 | 2469 |
| 1323024 | 25529 | 25548 | N/A | N/A | TGACCCTATTATTTATTCAC | 63 | 2470 |
| 1323026 | 36124 | 36143 | 3396 | 3415 | CCACCAGAATTCCCAGACTT | 69 | 2471 |
| 1323064 | 27840 | 27859 | N/A | N/A | TTAGTTAGAATTTCCAGGAA | 60 | 2472 |
| 1323074 | 25233 | 25252 | N/A | N/A | TGTATATCTTTCTTTCCATC | 45 | 2473 |
| 1323116 | 25662 | 25681 | N/A | N/A | ACTGCTTTCAATTTTTGAAC | 62 | 2474 |
| 1323122 | 13492 | 13511 | N/A | N/A | CATCTTAATTTCCTTATGCT | 99 | 2475 |
| 1323292 | 30781 | 30800 | N/A | N/A | CTATTTCCAAAACAACCACC | 96 | 2476 |
| 1323322 | 24848 | 24867 | N/A | N/A | ACATAGTTCTTTCCAACTTT | 66 | 2477 |

TABLE 33
Reduction of IFNAR1 RNA by 5-10-5 MOE gapmers with mixed PO/PS internucleoside linkages
in A431 cells

| | SEQ ID | SEQ ID | SEQ ID | SEQ ID | | | |
|---|---|---|---|---|---|---|---|
| | NO 1 | NO 1 | NO 2 | NO 2 | | IFNAR1 | |
| Compound | Start | Stop | Start | Stop | | (% | SEQ ID |
| Number | Site | Site | Site | Site | Sequence (5' to 3') | UTC) | NO |
| 1320921 | 13728 | 13747 | N/A | N/A | CACCTGGATCACCCTGCGCA | 76 | 2478 |
| 1320993 | 29326 | 29345 | N/A | N/A | ATAAGAACCAATTTTTGTCC | 105 | 2479 |
| 1321000 | 34657 | 34676 | 1929 | 1948 | AAGATGTTTTTTCTTTCCCT | 79 | 2480 |
| 1321028 | 14024 | 14043 | N/A | N/A | TGGTGACATCATCACAAATA | 84 | 2481 |
| 1321038 | 22363 | 22382 | 619 | 638 | GTAAAGCTTAAACCATCCAA | 26 | 2482 |
| 1321068 | 32354 | 32373 | N/A | N/A | AGCACTTTTACACCATACAA | 37 | 2483 |
| 1321069 | 8325 | 8344 | N/A | N/A | TTGGTTCTCATCCATTTGTT | 59 | 2484 |
| 1321072 | 24846 | 24865 | N/A | N/A | ATAGTTCTTTCCAACTTTCT | 65 | 2485 |
| 1321098 | 25750 | 25769 | N/A | N/A | CACCTTTACATTTTCAATTT | 83 | 2486 |
| 1321110 | 25232 | 25251 | N/A | N/A | GTATATCTTTCTTTCCATCT | 26 | 2487 |
| 1321136 | 25138 | 25157 | N/A | N/A | TTCCAATCAATATAAACTAC | 69 | 2488 |
| 1321147 | 26882 | 26901 | N/A | N/A | ATTCTACTTATTCAGCTTTC | 67 | 2489 |
| 1321200 | 13491 | 13510 | N/A | N/A | ATCTTAATTTCCTTATGCTT | 82 | 2490 |
| 1321207 | 9374 | 9393 | N/A | N/A | TAGTCTTTAATATCCGGCTC | 88 | 2491 |
| 1321269 | 16463 | 16482 | N/A | N/A | CTTATTTCTTCATTGCCTGC | 65 | 2492 |
| 1321298 | 31751 | 31770 | N/A | N/A | CGATAATTTTTCTCTAGAAA | 76 | 2493 |
| 1321307 | 7307 | 7326 | N/A | N/A | CCATTAACAACAACACAGAC | 96 | 2494 |
| 1321314 | 30267 | 30286 | N/A | N/A | CAGCACATCTACTTGGGCTC | 83 | 2495 |
| 1321433 | 38367 | 38386 | 5639 | 5658 | CCATGATGAATACCTTTTAA | 79 | 2496 |
| 1321445 | 26978 | 26997 | N/A | N/A | ACCTTCCTCAAATCCAGAGC | 70 | 2497 |
| 1321492 | 29744 | 29763 | N/A | N/A | TCAGACAATTAAAAAGGGAA | 72 | 2498 |
| 1321508 | 11965 | 11984 | N/A | N/A | TCTGTATCTCTCTCCAGACT | 82 | 2499 |
| 1321560 | 18487 | 18506 | N/A | N/A | GATGCCATTTTAAAGACGAT | 17 | 2500 |
| 1321562 | 28534 | 28553 | N/A | N/A | GTCTTTTTACCTCAGCATTT | 61 | 2501 |
| 1321587 | 25342 | 25361 | N/A | N/A | TACACTTCCCTTCTCCCTCA | 72 | 2502 |
| 1321588 | 26631 | 26650 | N/A | N/A | AAGGTCCCAAATCAGTTGAA | 33 | 2503 |
| 1321603 | 35654 | 35673 | 2926 | 2945 | CAGATCTTAAAATACAACAA | 84 | 2504 |
| 1321674 | 28166 | 28185 | 1011 | 1030 | GAGGAAAGACACACTGGGTA | N.D. | 2505 |
| 1321692 | N/A | N/A | 220 | 239 | TTTAGATTTTTTCCACCTGC | 37 | 2506 |
| 1321706 | 5179 | 5198 | N/A | N/A | GTCTTCCCATATTTTGGACA | 95 | 2507 |
| 1321743 | 12479 | 12498 | N/A | N/A | CCTTTCTTCCTCTCTTATTA | 105 | 2508 |
| 1321789 | 31077 | 31096 | N/A | N/A | TGCAAGCATTATTTAATTTC | 26 | 2509 |
| 1321808 | 36121 | 36140 | 3393 | 3412 | CCAGAATTCCCAGACTTCCT | 56 | 2510 |
| 1321813 | 30780 | 30799 | N/A | N/A | TATTTCCAAAACAACCACCA | 91 | 2511 |
| 1321816 | 31293 | 31312 | N/A | N/A | TAGATACACCACTATAACCA | 60 | 2512 |
| 1321880 | N/A | N/A | 521 | 540 | TGGAGGACCAATCTGAGCTT | 33 | 2513 |
| 1321890 | 38115 | 38134 | 5387 | 5406 | TTTAGATTTCATTCATTCAA | 69 | 2514 |
| 1321923 | 24646 | 24665 | N/A | N/A | ATAACACATGCAACTAGTTA | 82 | 2515 |
| 1321935 | 25528 | 25547 | N/A | N/A | GACCCTATTATTTATTCACT | 45 | 2516 |
| 1321991 | 32969 | 32988 | N/A | N/A | AAGGACAATCATTACTATCT | 42 | 2517 |
| 1322016 | 22857 | 22876 | N/A | N/A | GCCTGAACTTTTAAGTAGAA | 57 | 2518 |
| 1322051 | 17392 | 17411 | N/A | N/A | CAGCACGCACCACCACATCC | 156 | 2519 |
| 1322092 | 37401 | 37420 | 4673 | 4692 | TCATATAAATTCTTAGATTA | 109 | 2520 |
| 1322176 | 24313 | 24332 | 888 | 907 | TTGCATATGTATAATCCCAT | 5 | 132 |
| 1322208 | 33922 | 33941 | N/A | N/A | CAATTGAGAAATTATTGGCT | 109 | 2521 |
| 1322247 | 30082 | 30101 | N/A | N/A | GTTTCTATAGTAACAATTAT | 66 | 2522 |
| 1322297 | 10779 | 10798 | N/A | N/A | GTATGGTTTTAATTTGGGAA | 35 | 2523 |
| 1322330 | 29472 | 29491 | N/A | N/A | GGGCAATTTTTTCCTAATCC | 27 | 2524 |
| 1322383 | 25842 | 25861 | N/A | N/A | GTCTACTTAAAAAAAATCTG | 72 | 2525 |
| 1322501 | 27839 | 27858 | N/A | N/A | TAGTTAGAATTTCCAGGAAT | 43 | 2526 |
| 1322522 | 18166 | 18185 | N/A | N/A | TATAATTTCAACCCAACCTC | 91 | 2527 |
| 1322549 | 5916 | 5935 | N/A | N/A | ACAAAATTACCTCTCACTCT | 88 | 2528 |
| 1322594 | 24299 | 24318 | 874 | 893 | TCCCATTTAAGAACATAGTT | 48 | 2529 |
| 1322603 | 37071 | 37090 | 4343 | 4362 | GACCTAACAATTTCACTGGT | 92 | 2530 |
| 1322611 | 19999 | 20018 | 348 | 367 | TCCAATTATCCATCCCAGTT | 24 | 2531 |
| 1322630 | 9667 | 9686 | N/A | N/A | ACTCTAGCACTCTTAGTTAA | 89 | 2532 |
| 1322655 | 25661 | 25680 | N/A | N/A | CTGCTTTCAATTTTTGAACC | 61 | 2533 |
| 1322660 | 28596 | 28615 | N/A | N/A | CATTCAAGCTTTATTTACCC | 50 | 2534 |
| 1322737 | 25183 | 25202 | N/A | N/A | TACTTAATTTTCCTCTTCTC | 88 | 2535 |
| 1322755 | 16056 | 16075 | N/A | N/A | AACAATATATTTACAAAGTG | 95 | 2536 |
| 1322782 | 34409 | 34428 | 1681 | 1700 | TTAGTTTCTTCTACTGTAGC | 61 | 2537 |
| 1322784 | 6279 | 6298 | N/A | N/A | GCTAACCTAATTTTAAATTA | 103 | 2538 |
| 1322851 | 21124 | 21143 | N/A | N/A | GGCCACTACACTCAGCTCCT | 96 | 2539 |
| 1322916 | 27345 | 27364 | N/A | N/A | CATATGTTCCCAACTCCATA | 49 | 2540 |
| 1322979 | 22542 | 22561 | 686 | 705 | TCTGGAATAAATATTTTCAA | 52 | 2541 |
| 1322993 | 4815 | 4834 | N/A | N/A | TAACTGACTCCCTTTACTCT | 91 | 2542 |
| 1322995 | 29964 | 29983 | N/A | N/A | CCTTTTAAACCTTATAAACA | 97 | 2543 |
| 1323002 | 35385 | 35404 | 2657 | 2676 | GTAAGCTACTTTCCAGAAAA | 64 | 2544 |
| 1323016 | 8549 | 8568 | N/A | N/A | GAACTTTCTTAACTGAGACA | 87 | 2545 |
| 1323051 | 33604 | 33623 | N/A | N/A | TGCTTTCATTTAATATGCTA | 90 | 2546 |
| 1323063 | 11548 | 11567 | N/A | N/A | TTTGAATTCCTTTTCCAGCA | 74 | 2547 |
| 1323076 | 27069 | 27088 | N/A | N/A | GCCCAGAACTCTAATAGCCT | 46 | 2548 |
| 1323094 | 20508 | 20527 | N/A | N/A | AATCAGTGACCATATCACCA | 53 | 2549 |
| 1323143 | 35811 | 35830 | 3083 | 3102 | CATTCTTCTTCCTCTTGCAC | 57 | 2550 |
| 1323156 | 28976 | 28995 | N/A | N/A | ACAGTGCAAAACATGAAAAA | 93 | 2551 |
| 1323199 | 8792 | 8811 | N/A | N/A | GGCAGAATTTATATCGCTTC | 84 | 2552 |
| 1323251 | 7771 | 7790 | N/A | N/A | ACATTCATTTTCACGACCAA | 50 | 2553 |
| 1323256 | 19588 | 19607 | N/A | N/A | ATCTTATCTTCCTTATTGAA | 85 | 2554 |

### Example 3: Effect of Modified Oligonucleotides on Human IFNAR1 In Vitro, Multiple Doses

[0640] Modified oligonucleotides selected from the examples above were tested at various doses in A431 cells. Cultured A431 cells at a density of 10,000 cells per well were treated by free uptake with various concentrations of modified oligonucleotide as specified in the tables below. After a treatment period of approximately 48 hours, total RNA was isolated from the cells and IFNAR1 RNA levels were measured by quantitative real-time RTPCR. Human IFNAR1 primer-probe set RTS44352 (described herein above) was used to measure RNA levels as described above. IFNAR1 RNA levels were normalized to total RNA content, as measured by RIBOGREEN®. Reduction of IFNAR1 RNA is presented in the tables below as percent IFNAR1 RNA, relative to untreated control cells (% UTC).

[0641] The half maximal inhibitory concentration (IC₅₀) of each modified oligonucleotide was calculated using a linear regression on a log/linear plot of the data in Excel and is also presented in the tables below. N. D. in the tables below refers to instances where the value was Not Defined.

TABLE 34
Dose-dependent reduction of human IFNAR1 RNA
in A431 cells by modified oligonucleotides

| Compound | IFNAR1 RNA (% UTC) | | | | IC₅₀ |
|---|---|---|---|---|---|
| No. | 16 nM | 80 nM | 400 nM | 2000 nM | (μM) |
| 1273126 | 63 | 15 | 7 | 4 | 0.02 |
| 1273127 | 37 | 9 | 5 | 4 | <0.02 |
| 1273131 | 64 | 14 | 5 | 2 | 0.02 |
| 1273135 | 31 | 3 | 1 | 1 | <0.02 |
| 1273136 | 18 | 3 | 1 | 1 | <0.02 |
| 1273141 | 9 | 3 | 1 | 1 | <0.02 |
| 1273142 | 58 | 20 | 6 | 3 | <0.02 |
| 1273144 | 21 | 3 | 2 | 1 | <0.02 |
| 1273147 | 33 | 8 | 3 | 3 | <0.02 |
| 1273150 | 52 | 13 | 4 | 3 | <0.02 |
| 1273157 | 57 | 18 | 5 | 2 | <0.02 |
| 1273158 | 63 | 17 | 4 | 2 | 0.02 |
| 1273166 | 86 | 24 | 6 | 4 | 0.05 |
| 1273176 | 44 | 9 | 6 | 6 | <0.02 |
| 1273177 | 66 | 20 | 7 | 6 | 0.02 |
| 1273181 | 37 | 8 | 2 | 1 | <0.02 |
| 1273191 | 51 | 13 | 5 | 5 | <0.02 |
| 1273192 | 40 | 6 | 3 | 2 | <0.02 |
| 1273196 | 12 | 3 | 3 | 3 | <0.02 |

TABLE 35
Dose-dependent reduction of human IFNAR1 RNA
in A431 cells by modified oligonucleotides

| Compound | IFNAR1 RNA (% UTC) | | | | IC₅₀ |
|---|---|---|---|---|---|
| No. | 78.125 nM | 312.5 nM | 1250 nM | 5000 nM | (μM) |
| 1321056 | 60 | 31 | 19 | 11 | 0.12 |
| 1321058 | 77 | 48 | 28 | 15 | 0.37 |
| 1321187 | 61 | 32 | 16 | 8 | 0.12 |
| 1321277 | 60 | 39 | 23 | 11 | 0.15 |
| 1321555 | 65 | 48 | 36 | 26 | 0.32 |
| 1321707 | 81 | 51 | 36 | 17 | 0.48 |
| 1321856 | 80 | 54 | 34 | 25 | 0.55 |
| 1321877 | 29 | 11 | 5 | 3 | <0.08 |
| 1321995 | 34 | 18 | 10 | 7 | <0.08 |
| 1322064 | 58 | 37 | 25 | 20 | 0.12 |
| 1322108 | 58 | 44 | 32 | 25 | 0.18 |
| 1322176 | 57 | 34 | 19 | 9 | 0.11 |
| 1322246 | 53 | 32 | 21 | 13 | <0.08 |
| 1322250 | 63 | 38 | 17 | 9 | 0.16 |
| 1322326 | 71 | 43 | 24 | 15 | 0.26 |
| 1322416 | 60 | 40 | 27 | 15 | 0.16 |
| 1322537 | 64 | 49 | 31 | 16 | 0.27 |
| 1323149 | 66 | 44 | 24 | 17 | 0.23 |
| 1323257 | 80 | 47 | 31 | 18 | 0.41 |

TABLE 36
Dose-dependent reduction of human IFNAR1 RNA
in A431 cells by modified oligonucleotides

| Compound | IFNAR1 RNA (% UTC) | | | | IC₅₀ |
|---|---|---|---|---|---|
| No. | 78.125 nM | 312.5 nM | 1250 nM | 5000 nM | (μM) |
| 1320946 | 61 | 30 | 14 | 7 | 0.11 |
| 1320983 | 59 | 35 | 21 | 15 | 0.12 |
| 1321332 | 62 | 41 | 24 | 13 | 0.17 |
| 1321484 | 41 | 29 | 23 | 20 | <0.08 |
| 1321625 | 22 | 10 | 6 | 4 | <0.08 |
| 1321703 | 31 | 18 | 0 | 8 | <0.08 |
| 1322176 | 65 | 34 | 18 | 10 | 0.16 |
| 1322260 | 59 | 40 | 28 | 23 | 0.15 |
| 1322321 | 82 | 47 | 28 | 12 | 0.39 |
| 1322424 | 53 | 23 | 12 | 7 | <0.08 |
| 1322428 | 57 | 27 | 12 | 7 | 0.08 |
| 1322502 | 56 | 31 | 19 | 14 | 0.09 |
| 1322713 | 56 | N.D. | N.D. | 86 | <0.08 |
| 1322724 | 74 | 37 | 30 | 23 | 0.28 |
| 1322725 | 56 | 31 | 15 | 7 | 0.09 |
| 1323053 | 46 | 26 | 17 | 13 | <0.08 |
| 1323071 | 35 | 15 | 7 | 5 | <0.08 |
| 1323098 | 73 | 43 | 22 | 12 | 0.27 |
| 1323141 | 58 | 30 | 19 | 10 | 0.10 |

TABLE 37
Dose-dependent reduction of human IFNAR1 RNA
in A431 cells by modified oligonucleotides

| Compound | IFNAR1 RNA (% UTC) | | | | IC₅₀ |
|---|---|---|---|---|---|
| No. | 78.125 nM | 312.5 nM | 1250 nM | 5000 nM | (μM) |
| 1321049 | 53 | 35 | 20 | 17 | <0.08 |
| 1321090 | 41 | 19 | 10 | 6 | <0.08 |
| 1321317 | 77 | 45 | 28 | 21 | 0.37 |
| 1321326 | 115 | 117 | 110 | 106 | >5 |
| 1321452 | 114 | 102 | 95 | 85 | >5 |
| 1321547 | 68 | 43 | 26 | 13 | 0.24 |
| 1321618 | 16 | 6 | 3 | 2 | <0.08 |
| 1321713 | 55 | 21 | 9 | 4 | <0.08 |
| 1321860 | 100 | 70 | 52 | 35 | 1.57 |
| 1322106 | 63 | 41 | 28 | 20 | 0.20 |
| 1322134 | 45 | 28 | 16 | 11 | <0.08 |
| 1322176 | 58 | 34 | 19 | 11 | 0.11 |
| 1322202 | 35 | 17 | 10 | 6 | <0.08 |
| 1322364 | 60 | 35 | 24 | 16 | 0.13 |
| 1322670 | 81 | 61 | 40 | 27 | 0.74 |
| 1322789 | 46 | 27 | 22 | 20 | <0.08 |
| 1322800 | 58 | 31 | 20 | 12 | 0.10 |
| 1323241 | 87 | 56 | 37 | 24 | 0.68 |
| 1323347 | 70 | 49 | 32 | 21 | 0.35 |

TABLE 38
Dose-dependent reduction of human IFNAR1 RNA
in A431 cells by modified oligonucleotides

| Compound | IFNAR1 RNA (% UTC) | | | | IC₅₀ |
|---|---|---|---|---|---|
| No. | 78.125 nM | 312.5 nM | 1250 nM | 5000 nM | (μM) |
| 1320997 | 74 | 63 | 40 | 26 | 0.68 |
| 1321032 | 57 | 37 | 25 | 21 | 0.11 |
| 1321040 | 50 | 26 | 17 | 10 | <0.08 |
| 1321118 | 97 | 77 | 72 | 65 | >5 |
| 1321139 | 73 | 61 | 42 | 34 | 0.80 |
| 1321249 | 69 | 40 | 21 | 9 | 0.22 |
| 1321529 | 55 | 43 | 37 | 30 | 0.14 |
| 1321817 | 49 | 29 | 19 | 13 | <0.08 |
| 1322164 | 45 | 24 | 13 | 8 | <0.08 |
| 1322170 | 53 | 30 | 17 | 11 | 0.07 |
| 1322176 | 58 | 30 | 17 | 10 | 0.09 |
| 1322216 | 56 | 29 | 14 | 8 | 0.08 |
| 1322362 | 52 | 36 | 24 | 17 | <0.08 |
| 1322610 | 132 | 126 | 130 | 115 | >5 |
| 1322621 | 83 | 69 | 66 | 50 | >5 |
| 1322905 | 56 | 31 | 18 | 11 | 0.09 |
| 1323059 | 33 | 13 | 6 | 4 | <0.08 |
| 1323152 | 84 | 53 | 36 | 22 | 0.57 |
| 1323169 | 33 | 17 | 11 | 8 | <0.08 |

TABLE 39
Dose-dependent reduction of human IFNAR1 RNA
in A431 cells by modified oligonucleotides

| Compound | IFNAR1 RNA (% UTC) | | | | IC₅₀ |
|---|---|---|---|---|---|
| No. | 78.125 nM | 312.5 nM | 1250 nM | 5000 nM | (μM) |
| 1320923 | 70 | 48 | 28 | 21 | 0.32 |
| 1320992 | 84 | 62 | 42 | 27 | 0.81 |
| 1321036 | 71 | 40 | 20 | 15 | 0.23 |
| 1321192 | 73 | 43 | 22 | 13 | 0.27 |
| 1321239 | 62 | 39 | 30 | 25 | 0.17 |
| 1321750 | 81 | 47 | 28 | 19 | 0.41 |
| 1321910 | 48 | 19 | 11 | 7 | <0.08 |
| 1322042 | 68 | 45 | 29 | 22 | 0.27 |
| 1322054 | 72 | 51 | 33 | 24 | 0.41 |
| 1322131 | 57 | 33 | 21 | 18 | 0.10 |
| 1322160 | 38 | 20 | 8 | 6 | <0.08 |
| 1322176 | 55 | 32 | 17 | 11 | 0.08 |
| 1322384 | 67 | 41 | 23 | 13 | 0.21 |
| 1322470 | 83 | 46 | 24 | 14 | 0.38 |
| 1322518 | 75 | 51 | 39 | 31 | 0.56 |
| 1322875 | 72 | 49 | 31 | 19 | 0.35 |
| 1322988 | 64 | 41 | 27 | 23 | 0.20 |
| 1323100 | 76 | 41 | 29 | 21 | 0.34 |
| 1323315 | 73 | 59 | 44 | 36 | 0.88 |

TABLE 40
Dose-dependent reduction of human IFNAR1 RNA
in A431 cells by modified oligonucleotides

| Compound | IFNAR1 RNA (% UTC) | | | | IC₅₀ |
|---|---|---|---|---|---|
| No. | 78.125 nM | 312.5 nM | 1250 nM | 5000 nM | (μM) |
| 1321527 | 55 | 32 | 19 | 13 | 0.09 |
| 1321599 | 43 | 27 | 11 | 6 | <0.08 |
| 1321608 | 67 | 39 | 27 | 22 | 0.22 |
| 1321812 | 49 | 32 | 17 | 12 | <0.08 |
| 1321907 | 61 | 35 | 18 | 12 | 0.13 |
| 1321974 | 85 | 57 | 41 | 36 | 0.95 |
| 1322032 | 54 | 31 | 19 | 13 | <0.08 |
| 1322176 | 43 | 20 | 10 | 6 | <0.08 |
| 1322252 | 72 | 46 | 27 | 15 | 0.31 |
| 1322263 | 50 | 26 | 14 | 9 | <0.08 |
| 1322316 | 41 | 6 | 18 | 25 | <0.08 |
| 1322382 | 63 | 46 | 26 | 17 | 0.22 |
| 1322466 | 52 | 36 | 19 | 15 | <0.08 |
| 1322497 | 53 | 32 | 20 | 13 | <0.08 |
| 1322540 | 48 | 26 | 14 | 8 | <0.08 |
| 1322803 | 59 | 45 | 29 | 24 | 0.18 |
| 1322836 | 71 | 38 | 24 | 18 | 0.24 |
| 1323008 | 85 | 56 | 32 | 19 | 0.55 |
| 1323127 | 56 | 38 | 23 | 15 | 0.12 |

TABLE 41
Dose-dependent reduction of human IFNAR1 RNA
in A431 cells by modified oligonucleotides

| Compound | IFNAR1 RNA (% UTC) | | | | IC₅₀ |
|---|---|---|---|---|---|
| No. | 78.125 nM | 312.5 nM | 1250 nM | 5000 nM | (μM) |
| 1321066 | 85 | 60 | 44 | 28 | 0.85 |
| 1321074 | 51 | 26 | 15 | 12 | <0.08 |
| 1321151 | 36 | 18 | 11 | 7 | <0.08 |
| 1321377 | 68 | 36 | 22 | 14 | 0.20 |
| 1321453 | 38 | 23 | 15 | 9 | <0.08 |
| 1321581 | 76 | 43 | 27 | 17 | 0.32 |
| 1321854 | 65 | 47 | 26 | 15 | 0.24 |
| 1321882 | 48 | 33 | 24 | 17 | <0.08 |
| 1322176 | 50 | 26 | 12 | 6 | <0.08 |
| 1322217 | 66 | 45 | 26 | 22 | 0.25 |
| 1322393 | 58 | 31 | 21 | 14 | 0.10 |
| 1322535 | 55 | 28 | 17 | 8 | <0.08 |
| 1322559 | 54 | 31 | 14 | 9 | <0.08 |
| 1322738 | 74 | 52 | 35 | 26 | 0.48 |
| 1322932 | 75 | 55 | 47 | 37 | 0.93 |
| 1322943 | 51 | 23 | 13 | 6 | <0.08 |
| 1322986 | 27 | 13 | 4 | 2 | <0.08 |
| 1323093 | 71 | 45 | 26 | 17 | 0.28 |
| 1323227 | 66 | 35 | 17 | 7 | 0.16 |

TABLE 42
Dose-dependent reduction of human IFNAR1 RNA
in A431 cells by modified oligonucleotides

| Compound | IFNAR1 RNA (% UTC) | | | | IC₅₀ |
|---|---|---|---|---|---|
| No. | 78.125 nM | 312.5 nM | 1250 nM | 5000 nM | (μM) |
| 1321321 | 30 | 14 | 6 | 3 | <0.08 |
| 1321504 | 32 | 12 | 5 | 2 | <0.08 |
| 1321541 | 51 | 30 | 18 | 12 | <0.08 |
| 1321687 | 56 | 30 | 17 | 10 | 0.08 |
| 1321729 | 49 | 24 | 15 | 11 | <0.08 |
| 1321820 | 55 | 35 | 21 | 16 | 0.09 |
| 1321872 | 54 | 30 | 14 | 7 | <0.08 |
| 1322128 | 66 | 49 | N.D. | 14 | <0.08 |
| 1322176 | 51 | 25 | 11 | 5 | <0.08 |
| 1322197 | 33 | 14 | 6 | 4 | <0.08 |
| 1322345 | 74 | 33 | N.D. | N.D. | N.D. |
| 1322570 | 40 | 24 | 12 | 8 | <0.08 |
| 1322844 | 75 | 54 | 33 | 19 | 0.44 |
| 1323029 | N.D. | 10 | 4 | 3 | <0.08 |
| 1323056 | 41 | 29 | 20 | 15 | <0.08 |
| 1323090 | 64 | 36 | 15 | 7 | 0.15 |
| 1323167 | N.D. | 1 | 10 | 5 | <0.08 |
| 1323262 | 36 | 23 | 14 | 8 | <0.08 |

TABLE 43
Dose-dependent reduction of human IFNAR1 RNA
in A431 cells by modified oligonucleotides

| Compound | IFNAR1 RNA (% UTC) | | | | IC₅₀ |
|---|---|---|---|---|---|
| No. | 78.125 nM | 312.5 nM | 1250 nM | 5000 nM | (μM) |
| 1321111 | 50 | 32 | 23 | 18 | <0.08 |
| 1321177 | 60 | 44 | 33 | 26 | 0.19 |
| 1321328 | 59 | 41 | 27 | 22 | 0.15 |
| 1321592 | 87 | 65 | 42 | 26 | 0.87 |
| 1321761 | 64 | 40 | 28 | 15 | 0.20 |
| 1322014 | 50 | 37 | 25 | 22 | <0.08 |
| 1322058 | 45 | 32 | 23 | 18 | <0.08 |
| 1322176 | 50 | 26 | 12 | 7 | <0.08 |
| 1322183 | 39 | 21 | 13 | 7 | <0.08 |
| 1322651 | 52 | 23 | 12 | 8 | <0.08 |
| 1322658 | 41 | 26 | 18 | 14 | <0.08 |
| 1322672 | 95 | 80 | 55 | 41 | 2.34 |
| 1322677 | 56 | 37 | 25 | 19 | 0.11 |
| 1322697 | 91 | 65 | 41 | 35 | 1.12 |
| 1322923 | 63 | 36 | 26 | 23 | 0.16 |
| 1323097 | 66 | 59 | 39 | 31 | 0.54 |
| 1323173 | 61 | 35 | 23 | 13 | 0.14 |
| 1323187 | 61 | 35 | 20 | 12 | 0.13 |
| 1323348 | 69 | 42 | 25 | 16 | 0.24 |

TABLE 44
Dose-dependent reduction of human IFNAR1 RNA
in A431 cells by modified oligonucleotides

| Compound | IFNAR1 RNA (% UTC) | | | | IC₅₀ |
|---|---|---|---|---|---|
| No. | 78.125 nM | 312.5 nM | 1250 nM | 5000 nM | (μM) |
| 1321038 | 85 | 56 | 30 | 15 | 0.51 |
| 1321110 | 82 | 51 | 32 | 21 | 0.49 |
| 1321195 | 37 | N.D. | N.D. | 56 | 4.69 |
| 1321560 | 92 | 65 | 42 | 24 | 0.89 |
| 1321789 | 48 | 34 | 19 | 13 | <0.08 |
| 1321846 | 81 | 21 | 8 | 15 | 0.20 |
| 1321880 | 64 | 45 | 29 | 22 | 0.23 |
| 1321943 | 46 | 25 | 14 | 6 | <0.08 |
| 1322098 | 87 | 64 | 40 | 28 | 0.87 |
| 1322176 | 44 | 23 | 10 | 7 | <0.08 |
| 1322187 | 70 | 52 | 40 | 36 | 0.59 |
| 1322272 | 114 | 112 | 98 | 94 | >5 |
| 1322330 | 65 | 46 | 26 | 19 | 0.24 |
| 1322367 | 74 | 61 | 42 | 29 | 0.73 |
| 1322373 | 62 | 46 | 26 | 16 | 0.21 |
| 1322451 | 48 | 45 | 32 | 32 | <0.08 |
| 1322611 | 80 | 50 | 31 | 17 | 0.43 |
| 1322653 | 63 | 44 | 26 | 16 | 0.21 |
| 1322684 | 51 | 31 | 17 | 9 | <0.08 |

### Example 4: Design of Modified Oligonucleotides Complementary to Human IFNAR1 Nucleic Acid

[0642] Modified oligonucleotides complementary to a human IFNAR1 nucleic acid were designed, as described in the tables below. “Start site” indicates the 5′-most nucleoside to which the modified oligonucleotide is complementary in the target nucleic acid sequence. “Stop site” indicates the 3′-most nucleoside to which the modified oligonucleotide is complementary in the target nucleic acid sequence. Each modified oligonucleotide listed in the tables below is 100% complementary to SEQ ID NO 1 (described herein above), to SEQ ID NO 2 (described herein above), or to both. ‘N/A’ indicates that the modified oligonucleotide is not 100% complementary to that particular target nucleic acid sequence.

[0643] The modified oligonucleotides in the table below are 5-10-5 MOE gapmers. The gapmers are 20 nucleosides in length, wherein the sugar motif for the gapmers is (from 5′ to 3′): eeeeeddddddddddeeeee; wherein each “d” represents a 2′-β-D-deoxyribosyl sugar moiety, and each “e” represents a 2′-MOE sugar moiety. The gapmers have an internucleosidic linkage motif of (from 5′ to 3′): soooossssssssssooss; wherein each “s” represents a phosphorothioate internucleoside linkage, and each “o” represents a phosphodiester internucleoside linkage. Each cytosine residue is a 5-methyl cytosine.

TABLE 45
5-10-5 MOE gapmers with mixed PO/PS internucleoside linkages complementary to human IFNAR1

| | | SEQ ID | SEQ ID | SEQ ID | SEQ ID | |
|---|---|---|---|---|---|---|
| | | NO 1 | NO 1 | NO 2 | NO 2 | |
| Compound | | Start | Stop | Start | Stop | SEQ ID |
| Number | Sequence (5' to 3') | Site | Site | Site | Site | NO |
| 1413519 | GCTGTTTTACATTTTTTTTC | 20592 | 20611 | N/A | N/A | 1952 |
| 1413521 | GCATTTATAATTTTGGTTGC | 7803 | 7822 | N/A | N/A | 2555 |
| 1413522 | CTGGTTTATTTTTTTTGGCT | 27811 | 27830 | N/A | N/A | 128 |
| 1413523 | TTTTCTTTTTCTGCTCTTAT | 20108 | 20127 | 457 | 476 | 2556 |
| 1413525 | CTGCTTTCAATTTTTGAACC | 25661 | 25680 | N/A | N/A | 2533 |
| 1413529 | ACGCAATTTAATTTCTTCAT | 20088 | 20107 | 437 | 456 | 2557 |
| 1413530 | TGGTTTTGTTTTCTCACATA | 31888 | 31907 | 1421 | 1440 | 2558 |
| 1413531 | ACTGCTTTCAATTTTTGAAC | 25662 | 25681 | N/A | N/A | 2474 |
| 1413534 | TGCTTTTATTCAGCTTTTCA | 31850 | 31869 | 1383 | 1402 | 2559 |
| 1413535 | TCTCAACTCTTTTAATTTCT | 35018 | 35037 | 2290 | 2309 | 2056 |
| 1413541 | CCTTATTTCTTCATTGCCTG | 16464 | 16483 | N/A | N/A | 2560 |
| 1413547 | GTTTGAATTCCTTTTCCAGC | 11549 | 11568 | N/A | N/A | 2463 |
| 1413548 | GTTGTTTTTCATCATGTTTT | 11667 | 11686 | N/A | N/A | 2561 |
| 1413550 | CTGCTTTTATTCAGCTTTTC | 31851 | 31870 | 1384 | 1403 | 2562 |
| 1413551 | TTCAACCTTTTCTTCCACCA | 36286 | 36305 | 3558 | 3577 | 1654 |
| 1413553 | TTTGCATATGTATAATCCCA | 24314 | 24333 | 889 | 908 | 2563 |
| 1413554 | GCTTTCAATTTTTGAACCAC | 25659 | 25678 | N/A | N/A | 2564 |
| 1413555 | ATTTCTTTTACTTCTGCCTT | 8624 | 8643 | N/A | N/A | 2278 |
| 1413559 | TCACTCATATCTTAGTACCT | 34110 | 34129 | N/A | N/A | 2565 |
| 1413560 | TTACATTTTCAATTTCTGCA | 25745 | 25764 | N/A | N/A | 2566 |
| 1413561 | GTTCAACTGTTTTATGGCCT | 14177 | 14196 | N/A | N/A | 2018 |
| 1413562 | CCTCTCTTATTATTTATCAT | 12471 | 12490 | N/A | N/A | 222 |
| 1413563 | CTTGTTTTACTTTCGCTTTC | 34502 | 34521 | 1774 | 1793 | 2567 |
| 1413564 | CTGACAATTATGCTTCAGTC | 4600 | 4619 | N/A | N/A | 2568 |
| 1413567 | GTTCTAATTTTTAGTTACAA | 37614 | 37633 | 4886 | 4905 | 2569 |
| 1413568 | TCCTAGTTACATTTTTCCCC | 35996 | 36015 | 3268 | 3287 | 1074 |
| 1413570 | TCTTGCATACACTATCTTCT | 35709 | 35728 | 2981 | 3000 | 2570 |
| 1413574 | AGGCATTTTTGTCAAGCCTA | 18545 | 18564 | N/A | N/A | 2571 |
| 1413576 | TCACCTTTACATTTTCAATT | 25751 | 25770 | N/A | N/A | 2572 |
| 1413578 | TTTCACATTCATTTTCACGA | 7775 | 7794 | N/A | N/A | 2573 |
| 1413579 | AGCAACTTTTTCTTACCTTT | 20171 | 20190 | N/A | N/A | 154 |
| 1413580 | GCTTTAACTTTTAGACAATA | 22595 | 22614 | 739 | 758 | 2574 |
| 1413583 | CCACTCTTTTTCAATGCATA | 19785 | 19804 | N/A | N/A | 1553 |
| 1413585 | CCTACAATATTTCTTTTACT | 8632 | 8651 | N/A | N/A | 2575 |
| 1413586 | CCTTACCTTGTATTTCAGTA | 28277 | 28296 | N/A | N/A | 2576 |
| 1413587 | CCTCATTTTTTCTGTTTCTT | 25327 | 25346 | N/A | N/A | 2577 |
| 1413588 | TTGTAGACTTGTTCTACCAC | 8584 | 8603 | N/A | N/A | 2578 |
| 1413589 | CTGTTACTTCTTTGATGCAC | 9685 | 9704 | N/A | N/A | 2579 |
| 1413591 | TGCTATTTTTAGAATTCTTT | 12085 | 12104 | N/A | N/A | 2580 |
| 1413593 | ATCTTCTTTTCATTGGGCCA | 11520 | 11539 | N/A | N/A | 247 |
| 1413596 | TTGAGTATATCATCCCATCC | 12189 | 12208 | N/A | N/A | 2581 |
| 1413597 | ATCCTCCTATTCTTGTCTTC | 11168 | 11187 | N/A | N/A | 2582 |
| 1413598 | GCATTATTTAATTTCTCTCT | 31072 | 31091 | N/A | N/A | 335 |
| 1413600 | GCTCTATTATTATTGGCAAT | 7978 | 7997 | N/A | N/A | 2583 |
| 1413601 | TTCATATTTTAACATTCCAC | 23327 | 23346 | N/A | N/A | 1877 |
| 1413602 | GTTTTGTTTTTTTTAGCACT | 13429 | 13448 | N/A | N/A | 2584 |
| 1413603 | TCTTCATTAGAATAATTTCC | 34481 | 34500 | 1753 | 1772 | 2153 |
| 1413604 | TCTACTTATTCAGCTTTCTT | 26880 | 26899 | N/A | N/A | 2585 |
| 1413605 | GCTGTGAGATTCATATGCCA | 16559 | 16578 | N/A | N/A | 2044 |
| 1413608 | AGTGCTTTCATTTAATATGC | 33606 | 33625 | N/A | N/A | 2338 |
| 1413609 | TCTGTTTCATACTTGGAGTC | 8408 | 8427 | N/A | N/A | 2586 |
| 1413614 | GTTGCCAAGCATCCTGCACT | 29202 | 29221 | N/A | N/A | 2587 |
| 1413615 | GTGATATTAGATTCTTCCTT | 19081 | 19100 | N/A | N/A | 2588 |
| 1413616 | ACGCCTAATTTTTTTTTCTT | 31444 | 31463 | N/A | N/A | 2589 |
| 1413619 | ACCCTATTATTTATTCACTT | 25527 | 25546 | N/A | N/A | 142 |
| 1413621 | CTCAACATTTTTAGGGATCA | 35435 | 35454 | 2707 | 2726 | 2590 |
| 1413623 | TGGTTTTGTTTTTTTTAGCA | 13431 | 13450 | N/A | N/A | 2591 |
| 1413624 | TTGCTATTTTTAGAATTCTT | 12086 | 12105 | N/A | N/A | 2592 |
| 1413625 | TGGTTGTTTTTCATCATGTT | 11669 | 11688 | N/A | N/A | 1901 |
| 1413627 | TCTTTTTTTTCTTAAGCCAG | 24621 | 24640 | N/A | N/A | 2593 |
| 1413630 | TCACAGTTTAGATTTCATTC | 38121 | 38140 | 5393 | 5412 | 2594 |
| 1413631 | TCAGTTTGATTAGTTTCTTC | 34418 | 34437 | 1690 | 1709 | 2595 |
| 1413636 | CCCTATTATTTATTCACTTC | 25526 | 25545 | N/A | N/A | 218 |
| 1413637 | CTACAATTTATTGAATCTCT | 30029 | 30048 | N/A | N/A | 2596 |
| 1413638 | TGTGCATATGTTCCCAACTC | 27349 | 27368 | N/A | N/A | 2597 |
| 1413639 | CCCCAATTTTTTGCTTCAAC | 14830 | 14849 | N/A | N/A | 2598 |
| 1413640 | CTGCAAATATCACGGCCTCT | 37886 | 37905 | 5158 | 5177 | 2599 |
| 1413643 | CCCTCATTTTTTCTGTTTCT | 25328 | 25347 | N/A | N/A | 2600 |
| 1413644 | TTCTTTTTTTTCTTAAGCCA | 24622 | 24641 | N/A | N/A | 2601 |
| 1413646 | CTTCATACTTGATTTGCATT | 8776 | 8795 | N/A | N/A | 2602 |
| 1413647 | GCTACTTTTATATTTTCTTA | 18056 | 18075 | N/A | N/A | 1439 |
| 1413650 | AGCTACTTTTATATTTTCTT | 18057 | 18076 | N/A | N/A | 1359 |
| 1413651 | TCACATTCATTTTCACGACC | 7773 | 7792 | N/A | N/A | 2603 |
| 1413652 | GCTGGTTTATTTTTTTTGGC | 27812 | 27831 | N/A | N/A | 2604 |
| 1413653 | AGAGTTTTATACTTTTCCAT | 12385 | 12404 | N/A | N/A | 717 |
| 1413654 | TTTGTTTTTTTTAGCACTTT | 13427 | 13446 | N/A | N/A | 2605 |
| 1413655 | TTGTGCTTATATTTTCAATT | 34387 | 34406 | 1659 | 1678 | 2606 |
| 1413656 | CCTATTATTTATTCACTTCT | 25525 | 25544 | N/A | N/A | 2607 |
| 1413658 | GCTATACTTGCCTTTGCTCT | 25273 | 25292 | N/A | N/A | 2608 |
| 1413660 | TCCAACACATATATATCCAG | 33950 | 33969 | N/A | N/A | 2609 |
| 1413661 | TTTCCAGTTTCTTCTGACTT | 25309 | 25328 | N/A | N/A | 2610 |
| 1413662 | ACTTGATTTGCATTTTTTCA | 8770 | 8789 | N/A | N/A | 2611 |
| 1413663 | TCGCTTTCATCTTCATTAGA | 34490 | 34509 | 1762 | 1781 | 2612 |
| 1413664 | CCCTTTTTTCATTACCTCCC | 29509 | 29528 | N/A | N/A | 1446 |
| 1413665 | TGGCCTCAATTTGATTTCAC | 14163 | 14182 | N/A | N/A | 2613 |
| 1413666 | AGCATTATTTAATTTCTCTC | 31073 | 31092 | N/A | N/A | 2614 |
| 1413667 | TAGCAACTTTTTCTTACCTT | 20172 | 20191 | N/A | N/A | 2435 |
| 1413668 | GTTACCTATTTTCTATGACT | 35615 | 35634 | 2887 | 2906 | 949 |
| 1413669 | ATTCCTATCTTTTGCCTACC | 17081 | 17100 | N/A | N/A | 2615 |
| 1413670 | CACCAATGTATATCTTTCTT | 25239 | 25258 | N/A | N/A | 2616 |
| 1413671 | ACTGCTTTTATTCAGCTTTT | 31852 | 31871 | 1385 | 1404 | 2617 |
| 1413674 | TTTGCATTTTTTCAGAGTAT | 8764 | 8783 | N/A | N/A | 2618 |
| 1413675 | ACACTGCTTTTATTCAGCTT | 31854 | 31873 | 1387 | 1406 | 1060 |
| 1413676 | GCATTTTTTCAGAGTATCCA | 8761 | 8780 | N/A | N/A | 2619 |
| 1413677 | GTTACACTTTCTTTTTTTTC | 24630 | 24649 | N/A | N/A | 206 |
| 1413679 | TTTGAATTCCTTTTCCAGCA | 11548 | 11567 | N/A | N/A | 2547 |
| 1413682 | GTGACCCTATTATTTATTCA | 25530 | 25549 | N/A | N/A | 2394 |
| 1413685 | GTATTTTCATATTTGTTACT | 29985 | 30004 | N/A | N/A | 2620 |
| 1413690 | GTTTAGATTTCATTCATTCA | 38116 | 38135 | 5388 | 5407 | 2420 |
| 1413691 | TGTATATTTTTATATTAGCA | 21050 | 21069 | N/A | N/A | 1016 |
| 1413692 | TTGTTCATACCTTATCTCTT | 25805 | 25824 | N/A | N/A | 643 |
| 1413695 | GCTGATAATTACATTTCTGC | 14341 | 14360 | N/A | N/A | 1825 |
| 1413696 | ACTGTCATTTTTTATTGGCC | 4574 | 4593 | N/A | N/A | 2021 |
| 1413697 | TTTTGTTTTTTTTAGCACTT | 13428 | 13447 | N/A | N/A | 2621 |
| 1413698 | CACTTGTTTTACTTTCGCTT | 34504 | 34523 | 1776 | 1795 | 2622 |
| 1413701 | TTTCCAACTTTCTTTCCCAC | 24839 | 24858 | N/A | N/A | 446 |
| 1413702 | CCTAGTTACATTTTTCCCCC | 35995 | 36014 | 3267 | 3286 | 1102 |
| 1413704 | TCTCTTTTATCAGCTTTTTA | 25111 | 25130 | N/A | N/A | 2623 |
| 1413706 | GCTTCATACTTGATTTGCAT | 8777 | 8796 | N/A | N/A | 2624 |
| 1413708 | CCTTTCACATTCATTTTCAC | 7777 | 7796 | N/A | N/A | 2321 |
| 1413711 | TTTCATATTTGTTACTTCCT | 29981 | 30000 | N/A | N/A | 2625 |
| 1413714 | CCTCAATTTGATTTCACATT | 14160 | 14179 | N/A | N/A | 2626 |
| 1413715 | CGCTTCATACTTGATTTGCA | 8778 | 8797 | N/A | N/A | 2627 |
| 1413716 | CACTTGTTTTTTCTACAATT | 11817 | 11836 | N/A | N/A | 1363 |
| 1413717 | TGTCCACTCTTTTTGCTTCC | 7211 | 7230 | N/A | N/A | 2628 |
| 1413720 | CTGTCATTTTTTATTGGCCT | 4573 | 4592 | N/A | N/A | 2094 |
| 1413721 | TGGTTTATTTTTTTTGGCTT | 27810 | 27829 | N/A | N/A | 2629 |
| 1413722 | TTTCATTTAATATGCTAGCT | 33601 | 33620 | N/A | N/A | 2630 |
| 1413724 | ACTGACAATTATGCTTCAGT | 4601 | 4620 | N/A | N/A | 2631 |
| 1413731 | TTGGCTTTTTTTTTGAGACC | 27797 | 27816 | N/A | N/A | 2632 |
| 1413733 | GCCTCAATTTGATTTCACAT | 14161 | 14180 | N/A | N/A | 2633 |
| 1413734 | TTGCATTTTTTCAGAGTATC | 8763 | 8782 | N/A | N/A | 2634 |
| 1413735 | AGTTGATTTTTTTTCCTCTT | 14300 | 14319 | N/A | N/A | 2635 |
| 1413736 | TTCATATTTGTTACTTCCTT | 29980 | 29999 | N/A | N/A | 2636 |
| 1413737 | GCTGTTCTAATTTTTAGTTA | 37617 | 37636 | 4889 | 4908 | 1279 |
| 1413738 | GTTCATACCTTATCTCTTTC | 25803 | 25822 | N/A | N/A | 2637 |
| 1413740 | CCTTCAACCTTTTCTTCCAC | 36288 | 36307 | 3560 | 3579 | 1478 |
| 1413741 | GCTGCTTTAACTTTTAGACA | 22598 | 22617 | 742 | 761 | 2157 |
| 1413742 | TTTCCATTTCTTCAGTGCTT | 25621 | 25640 | N/A | N/A | 676 |
| 1413743 | TGTATTTTTTATGATCTTCA | 34438 | 34457 | 1710 | 1729 | 2638 |
| 1413745 | TTCCTTTAATGATGTCCCAT | 11853 | 11872 | N/A | N/A | 2639 |
| 1413746 | GAGCCTTACTCTTTGTCCCC | 23134 | 23153 | N/A | N/A | 2640 |
| 1413748 | ACTTGTTTTTTCTACAATTA | 11816 | 11835 | N/A | N/A | 1408 |
| 1489468 | TTTACATTTTTTTTCCAAAT | 20587 | 20606 | N/A | N/A | 2641 |
| 1489469 | TGGTGCTGTTTTACATTTTT | 20596 | 20615 | N/A | N/A | 2642 |
| 1489471 | GTGCTGTTTTACATTTTTTT | 20594 | 20613 | N/A | N/A | 2643 |
| 1489472 | CTGTTTTACATTTTTTTTCC | 20591 | 20610 | N/A | N/A | 2040 |
| 1489473 | TGTTTTACATTTTTTTTCCA | 20590 | 20609 | N/A | N/A | 2644 |
| 1489474 | GTTTTACATTTTTTTTCCAA | 20589 | 20608 | N/A | N/A | 2164 |
| 1489475 | TTTTACATTTTTTTTCCAAA | 20588 | 20607 | N/A | N/A | 2645 |
| 1489476 | GTGGTGCTGTTTTACATTTT | 20597 | 20616 | N/A | N/A | 2646 |
| 1492042 | TATTTTTTTTGGCTTTTTTT | 27805 | 27824 | N/A | N/A | 2647 |
| 1492043 | CAAGCTGGTTTATTTTTTTT | 27815 | 27834 | N/A | N/A | 2648 |
| 1492044 | AAGCTGGTTTATTTTTTTTG | 27814 | 27833 | N/A | N/A | 2649 |
| 1492045 | TTATTTTTTTTGGCTTTTTT | 27806 | 27825 | N/A | N/A | 2650 |
| 1492046 | TTTATTTTTTTTGGCTTTTT | 27807 | 27826 | N/A | N/A | 2651 |
| 1492047 | GTTTATTTTTTTTGGCTTTT | 27808 | 27827 | N/A | N/A | 2652 |
| 1492048 | GGTTTATTTTTTTTGGCTTT | 27809 | 27828 | N/A | N/A | 2653 |
| 1492051 | TATTTGTTACTTCCTTTTAA | 29976 | 29995 | N/A | N/A | 1896 |
| 1492052 | TATTTTCATATTTGTTACTT | 29984 | 30003 | N/A | N/A | 2654 |
| 1492053 | ATATTTGTTACTTCCTTTTA | 29977 | 29996 | N/A | N/A | 2655 |
| 1492054 | CATATTTGTTACTTCCTTTT | 29978 | 29997 | N/A | N/A | 2656 |
| 1492055 | TTTTCATATTTGTTACTTCC | 29982 | 30001 | N/A | N/A | 2657 |
| 1492056 | ATTTTCATATTTGTTACTTC | 29983 | 30002 | N/A | N/A | 2658 |
| 1492087 | CCATTTCTTCAGTGCTTTGT | 25618 | 25637 | N/A | N/A | 2659 |
| 1492088 | TTCCATTTCTTCAGTGCTTT | 25620 | 25639 | N/A | N/A | 2660 |
| 1492089 | CTTTCCATTTCTTCAGTGCT | 25622 | 25641 | N/A | N/A | 2661 |
| 1492090 | TCTTTCCATTTCTTCAGTGC | 25623 | 25642 | N/A | N/A | 587 |
| 1492091 | CTCTTTCCATTTCTTCAGTG | 25624 | 25643 | N/A | N/A | 2662 |
| 1492092 | TCCATTTCTTCAGTGCTTTG | 25619 | 25638 | N/A | N/A | 2663 |

[0644] The modified oligonucleotides in the table below are 5-10-5 MOE gapmers. The gapmers are 20 nucleosides in length, wherein the sugar motif for the gapmers is (from 5′ to 3′): eeeeeddddddddddeeeee; wherein each “d” represents a 2′-β-D-deoxyribosyl sugar moiety, and each “e” represents a 2′-MOE sugar moiety. The gapmers have an internucleoside linkage motif of (from 5′ to 3′): sooosssssssssssooss; wherein each “s” represents a phosphorothioate internucleoside linkage, and each “o” represents a phosphodiester internucleoside linkage. Each cytosine residue is a 5-methyl cytosine.

TABLE 46
5-10-5 MOE gapmers with mixed PO/PS internucleoside linkages complementary to human IFNAR1

| | | SEQ ID | SEQ ID | SEQ ID | SEQ ID | |
|---|---|---|---|---|---|---|
| | | NO 1 | NO 1 | NO 2 | NO 2 | |
| Compound | | Start | Stop | Start | Stop | SEQ ID |
| Number | Sequence (5' to 3') | Site | Site | Site | Site | NO |
| 1410683 | AAGTGTTTTCTTTTTCTGCT | 20113 | 20132 | 462 | 481 | 2664 |
| 1489455 | TTTTCTTTTTCTGCTCTTAT | 20108 | 20127 | 457 | 476 | 2556 |
| 1489456 | TTTCTTTTTCTGCTCTTATA | 20107 | 20126 | 456 | 475 | 2665 |
| 1489457 | TTCTTTTTCTGCTCTTATAC | 20106 | 20125 | 455 | 474 | 2666 |
| 1489458 | TCTTTTTCTGCTCTTATACG | 20105 | 20124 | 454 | 473 | 2667 |
| 1489459 | CTTTTTCTGCTCTTATACGC | 20104 | 20123 | 453 | 472 | 2668 |
| 1489461 | CTCTTTCCATTTCTTCAGTG | 25624 | 25643 | N/A | N/A | 2662 |
| 1489462 | CTTTCCATTTCTTCAGTGCT | 25622 | 25641 | N/A | N/A | 2661 |
| 1489463 | TTCCATTTCTTCAGTGCTTT | 25620 | 25639 | N/A | N/A | 2660 |
| 1489464 | TCCATTTCTTCAGTGCTTTG | 25619 | 25638 | N/A | N/A | 2663 |
| 1489467 | CCATTTCTTCAGTGCTTTGT | 25618 | 25637 | N/A | N/A | 2659 |
| 1489524 | TATCCAATTATCCATOCCAG | 20001 | 20020 | 350 | 369 | 2669 |
| 1489525 | TTTATCCAATTATCCATCCC | 20003 | 20022 | 352 | 371 | 2670 |
| 1492035 | CATATGTATAATCCCATTTA | 24310 | 24329 | 885 | 904 | 2671 |
| 1492036 | TGCATATGTATAATCCCATT | 24312 | 24331 | 887 | 906 | 2672 |
| 1492037 | TTTGCATATGTATAATCCCA | 24314 | 24333 | 889 | 908 | 2563 |
| 1492038 | TGTTTGCATATGTATAATCC | 24316 | 24335 | 891 | 910 | 2673 |
| 1492039 | CATGTTTGCATATGTATAAT | 24318 | 24337 | 893 | 912 | 2674 |
| 1492040 | TCATGTTTGCATATGTATAA | 24319 | 24338 | 894 | 913 | 2675 |
| 1492041 | GTCATGTTTGCATATGTATA | 24320 | 24339 | 895 | 914 | 2676 |
| 1492067 | AATTTTTCTCTCACATCGAT | 22449 | 22468 | N/A | N/A | 2677 |
| 1492068 | CTAATTTTTCTCTCACATCG | 22451 | 22470 | N/A | N/A | 2678 |
| 1492069 | TCGCCTAATTTTTCTCTCAC | 22455 | 22474 | N/A | N/A | 2679 |
| 1492070 | AATTCGCCTAATTTTTCTCT | 22458 | 22477 | N/A | N/A | 2680 |
| 1492071 | TAATTTTTCTCTCACATCGA | 22450 | 22469 | N/A | N/A | 2681 |

[0645] The modified oligonucleotides in the table below are 5-10-5 MOE gapmers. The gapmers are 20 nucleosides in length, wherein the sugar motif for the gapmers is (from 5′ to 3′): eeeeeddddddddddeeeee; wherein each “d” represents a 2′-β-D-deoxyribosyl sugar moiety, and each “e” represents a 2′-MOE sugar moiety. The internucleoside linkages are described in the table below, wherein each “s” represents a phosphorothioate internucleoside linkage, and each “o” represents a phosphodiester internucleoside linkage. Each cytosine residue is a 5-methyl cytosine.

TABLE 47
5-10-5 MOE gapmers with mixed PO/PS internucleoside linkages complementary to human IFNAR1

| | | | SEQ ID | SEQ ID | SEQ ID | SEQ ID | |
|---|---|---|---|---|---|---|---|
| | | | NO 1 | NO 1 | NO 2 | NO 2 | SEQ |
| Compound | | Internucleoside | Start | Stop | Start | Stop | ID |
| Number | Sequence (5' to 3') | Linkage (5' to 3') | Site | Site | Site | Site | NO |
| 1521445 | TATCCAATTATCCATCCCAG | SOOSOSSSSSSSSSSOOSS | 20001 | 20020 | 350 | 369 | 2669 |
| 1521493 | GTTTGCATATGTATAATCCC | SOOSOSSSSSSSSSSOSS | 24315 | 24334 | 890 | 909 | 1932 |
| 1521448 | TATCCAATTATCCATCCCAG | SOOSSSSSSSSSSSSOOSS | 20001 | 20020 | 350 | 369 | 2669 |
| 1521496 | GTTTGCATATGTATAATCCC | SOOSSSSSSSSSSSSOOSS | 24315 | 24334 | 890 | 909 | 1932 |
| 1521446 | TATCCAATTATCCATCCCAG | SOSOOSSSSSSSSSSOOSS | 20001 | 20020 | 350 | 369 | 2669 |
| 1521494 | GTTTGCATATGTATAATCCC | sosoOSSSSSSSSSSOOSS | 24315 | 24334 | 890 | 909 | 1932 |
| 1521449 | TATCCAATTATCCATCCCAG | SOSSOSSSSSSSSSSOOSS | 20001 | 20020 | 350 | 369 | 2669 |
| 1521497 | GTTTGCATATGTATAATCCC | SOSSOSSSSSSSSSSOOSS | 24315 | 24334 | 890 | 909 | 1932 |
| 1521499 | GTTTGCATATGTATAATCCC | SOSSSSSSSSSSSSSOOSS | 24315 | 24334 | 890 | 909 | 1932 |
| 1521447 | TATCCAATTATCCATCCCAG | SSOOOSSSSSSSSSSOOSS | 20001 | 20020 | 350 | 369 | 2669 |
| 1521495 | GTTTGCATATGTATAATCCC | SSOOOSSSSSSSSSSOOSS | 24315 | 24334 | 890 | 909 | 1932 |
| 1521498 | GTTTGCATATGTATAATCCC | SSSOOSSSSSSSSSSOOSS | 24315 | 24334 | 890 | 909 | 1932 |
| 1521500 | GTTTGCATATGTATAATCCC | SSOOSSSSSSSSSSOSSSS | 24315 | 24334 | 890 | 909 | 1932 |

[0646] The modified oligonucleotides in the table below are 6-10-4 MOE gapmers. The gapmers are 20 nucleosides in length, wherein the sugar motif for the gapmers is (from 5′ to 3′): eeeeeeddddddddddeeee; wherein each “d” represents a 2′-β-D-deoxyribosyl sugar moiety, and each “e” represents a 2′-MOE sugar moiety. The gapmers have an internucleoside linkage motif of (from 5′ to 3′): sooooossssssssssoss; wherein each “s” represents a phosphorothioate internucleoside linkage, and each “o” represents a phosphodiester internucleoside linkage. Each cytosine residue is a 5-methyl cytosine.

TABLE 48
6-10-4 MOE gapmers with mixed PO/PS internucleoside linkages complementary to human IFNAR1

| | | SEQ ID | SEQ ID | SEQ ID | SEQ ID | |
|---|---|---|---|---|---|---|
| | | NO 1 | NO 1 | NO 2 | NO 2 | |
| Compound | | Start | Stop | Start | Stop | SEQ ID |
| Number | Sequence (5' to 3') | Site | Site | Site | Site | NO |
| 1489477 | CTTTTTCTGCTCTTATACGC | 20104 | 20123 | 453 | 472 | 2668 |
| 1489478 | AAGTGTTTTCTTTTTCTGCT | 20113 | 20132 | 462 | 481 | 2664 |
| 1489479 | GAAGTGTTTTCTTTTTCTGC | 20114 | 20133 | 463 | 482 | 709 |
| 1489480 | TTCTTTTTCTGCTCTTATAC | 20106 | 20125 | 455 | 474 | 2666 |
| 1489481 | TTTCTTTTTCTGCTCTTATA | 20107 | 20126 | 456 | 475 | 2665 |
| 1489482 | TTTTCTTTTTCTGCTCTTAT | 20108 | 20127 | 457 | 476 | 2556 |
| 1489483 | GTTTTCTTTTTCTGCTCTTA | 20109 | 20128 | 458 | 477 | 1004 |
| 1489484 | TCTTTTTCTGCTCTTATACG | 20105 | 20124 | 454 | 473 | 2667 |
| 1489485 | TGTTTTCTTTTTCTGCTCTT | 20110 | 20129 | 459 | 478 | 2682 |
| 1489486 | AGTGTTTTCTTTTTCTGCTC | 20112 | 20131 | 461 | 480 | 811 |
| 1489487 | GTGTTTTCTTTTTCTGCTCT | 20111 | 20130 | 460 | 479 | 933 |
| 1489488 | TTTACATTTTTTTTCCAAAT | 20587 | 20606 | N/A | N/A | 2641 |
| 1489489 | TGGTGCTGTTTTACATTTTT | 20596 | 20615 | N/A | N/A | 2642 |
| 1489491 | TTTTACATTTTTTTTCCAAA | 20588 | 20607 | N/A | N/A | 2645 |
| 1489493 | TGTTTTACATTTTTTTTCCA | 20590 | 20609 | N/A | N/A | 2644 |
| 1489494 | CTGTTTTACATTTTTTTTCC | 20591 | 20610 | N/A | N/A | 2040 |
| 1489497 | GCTGTTTTACATTTTTTTTC | 20592 | 20611 | N/A | N/A | 1952 |
| 1489498 | TGCTGTTTTACATTTTTTTT | 20593 | 20612 | N/A | N/A | 2683 |
| 1489500 | GTGCTGTTTTACATTTTTTT | 20594 | 20613 | N/A | N/A | 2643 |
| 1489503 | GGTGCTGTTTTACATTTTTT | 20595 | 20614 | N/A | N/A | 2684 |
| 1489505 | GTGGTGCTGTTTTACATTTT | 20597 | 20616 | N/A | N/A | 2646 |
| 1489508 | GTTTTACATTTTTTTTCCAA | 20589 | 20608 | N/A | N/A | 2164 |
| 1489513 | CCATTTCTTCAGTGCTTTGT | 25618 | 25637 | N/A | N/A | 2659 |
| 1489514 | TTTCCATTTCTTCAGTGCTT | 25621 | 25640 | N/A | N/A | 676 |
| 1489515 | CTCTTTCCATTTCTTCAGTG | 25624 | 25643 | N/A | N/A | 2662 |
| 1489516 | ACTCTTTCCATTTCTTCAGT | 25625 | 25644 | N/A | N/A | 547 |
| 1489517 | TCCATTTCTTCAGTGCTTTG | 25619 | 25638 | N/A | N/A | 2663 |
| 1489518 | TTCCATTTCTTCAGTGCTTT | 25620 | 25639 | N/A | N/A | 2660 |
| 1489519 | CTTTCCATTTCTTCAGTGCT | 25622 | 25641 | N/A | N/A | 2661 |
| 1489520 | TCTTTCCATTTCTTCAGTGC | 25623 | 25642 | N/A | N/A | 587 |
| 1489527 | TTTTATCCAATTATCCATCC | 20004 | 20023 | 353 | 372 | 2304 |
| 1489531 | CCAATTATCCATCCCAGTTC | 19998 | 20017 | N/A | N/A | 116 |
| 1489532 | TCCAATTATCCATCCCAGTT | 19999 | 20018 | 348 | 367 | 2531 |
| 1489533 | ATCCAATTATCCATCCCAGT | 20000 | 20019 | 349 | 368 | 2434 |
| 1489534 | TATCCAATTATCCATCCCAG | 20001 | 20020 | 350 | 369 | 2669 |
| 1489535 | TTATCCAATTATCCATCCCA | 20002 | 20021 | 351 | 370 | 2334 |
| 1489536 | TTTATCCAATTATCCATCCC | 20003 | 20022 | 352 | 371 | 2670 |
| 1492074 | ATATTTGTTACTTCCTTTTA | 29977 | 29996 | N/A | N/A | 2655 |
| 1492075 | TCATATTTGTTACTTCCTTT | 29979 | 29998 | N/A | N/A | 2685 |
| 1492076 | TTCATATTTGTTACTTCCTT | 29980 | 29999 | N/A | N/A | 2636 |
| 1492077 | TTTTCATATTTGTTACTTCC | 29982 | 30001 | N/A | N/A | 2657 |
| 1492078 | ATTTTCATATTTGTTACTTC | 29983 | 30002 | N/A | N/A | 2658 |
| 1492080 | TATTTGTTACTTCCTTTTAA | 29976 | 29995 | N/A | N/A | 1896 |
| 1492081 | CATATTTGTTACTTCCTTTT | 29978 | 29997 | N/A | N/A | 2656 |
| 1492082 | TTTCATATTTGTTACTTCCT | 29981 | 30000 | N/A | N/A | 2625 |
| 1492122 | ATTTTTCTCTCACATCGATT | 22448 | 22467 | N/A | N/A | 2686 |
| 1492123 | AATTCGCCTAATTTTTCTCT | 22458 | 22477 | N/A | N/A | 2680 |
| 1492124 | AATTTTTCTCTCACATCGAT | 22449 | 22468 | N/A | N/A | 2677 |
| 1492125 | TAATTTTTCTCTCACATCGA | 22450 | 22469 | N/A | N/A | 2681 |
| 1492126 | CTAATTTTTCTCTCACATCG | 22451 | 22470 | N/A | N/A | 2678 |
| 1492127 | CCTAATTTTTCTCTCACATC | 22452 | 22471 | N/A | N/A | 1548 |
| 1492128 | GCCTAATTTTTCTCTCACAT | 22453 | 22472 | N/A | N/A | 1449 |
| 1492129 | CGCCTAATTTTTCTCTCACA | 22454 | 22473 | N/A | N/A | 1366 |
| 1492130 | TCGCCTAATTTTTCTCTCAC | 22455 | 22474 | N/A | N/A | 2679 |
| 1492131 | TTCGCCTAATTTTTCTCTCA | 22456 | 22475 | N/A | N/A | 1317 |
| 1492132 | ATTCGCCTAATTTTTCTCTC | 22457 | 22476 | N/A | N/A | 1210 |

[0647] The modified oligonucleotides in the table below are 6-10-4 MOE gapmers. The gapmers are 20 nucleosides in length, wherein the sugar motif for the gapmers is (from 5′ to 3′): eeeeeeddddddddddeeee; wherein each “d” represents a 2′-β-D-deoxyribosyl sugar moiety, and each “e” represents a 2′-MOE sugar moiety. The internucleoside linkages are described in the table below, wherein each “s” represents a phosphorothioate internucleoside linkage, and each “o” represents a phosphodiester internucleoside linkage. Each cytosine residue is a 5-methyl cytosine.

TABLE 49
6-10-4 MOE gapmers with mixed PO/PS internucleoside linkages complementary to human IFNAR1

| | | | SEQ ID | SEQ ID | SEQ ID | SEQ ID | |
|---|---|---|---|---|---|---|---|
| | | | NO 1 | NO 1 | NO 2 | NO 2 | |
| Compound | | Internucleoside | Start | Stop | Start | Stop | SEQ |
| Number | Sequence (5' to 3') | Linkage (5' to 3') | Site | Site | Site | Site | ID NO |
| 1492136 | CATTTCTTCAGTGCTTTGTA | soooosssssssssssoss | 25617 | 25636 | N/A | N/A | 2687 |
| 1492137 | CCATTTCTTCAGTGCTTTGT | soooosssssssssssoss | 25618 | 25637 | N/A | N/A | 2659 |
| 1492138 | TCCATTTCTTCAGTGCTTTG | soooosssssssssssoss | 25619 | 25638 | N/A | N/A | 2663 |
| 1492139 | TTCCATTTCTTCAGTGCTTT | ssosssssssssssoooos | 25620 | 25639 | N/A | N/A | 2660 |
| 1492140 | TTTCCATTTCTTCAGTGCTT | ssosssssssssssoooos | 25621 | 25640 | N/A | N/A | 676 |
| 1492141 | CTTTCCATTTCTTCAGTGCT | soooosssssssssssoss | 25622 | 25641 | N/A | N/A | 2661 |
| 1492142 | TCTTTCCATTTCTTCAGTGC | soooosssssssssssoss | 25623 | 25642 | N/A | N/A | 587 |
| 1492143 | CTCTTTCCATTTCTTCAGTG | soooosssssssssssoss | 25624 | 25643 | N/A | N/A | 2662 |
| 1521478 | TCGCCTAATTTTTCTCTCAC | soooosssssssssssoss | 22455 | 22474 | N/A | N/A | 2679 |
| 1521593 | ATCCAATTATCCATCCCAGT | soooosssssssssssoss | 20000 | 20019 | 349 | 368 | 2434 |
| 1521608 | TTATCCAATTATCCATCCCA | soooosssssssssssoss | 20002 | 20021 | 351 | 370 | 2334 |
| 1521479 | TCGCCTAATTTTTCTCTCAC | sooosossssssssssoss | 22455 | 22474 | N/A | N/A | 2679 |
| 1521502 | CTTTCCATTTCTTCAGTGCT | sooosossssssssssoss | 25622 | 25641 | N/A | N/A | 2661 |
| 1521594 | ATCCAATTATCCATCCCAGT | sooosossssssssssoss | 20000 | 20019 | 349 | 368 | 2434 |
| 1521609 | TTATCCAATTATCCATCCCA | sooosossssssssssoss | 20002 | 20021 | 351 | 370 | 2334 |
| 1521468 | CTGTTTTACATTTTTTTTCC | sooossssssssssssoss | 20591 | 20610 | N/A | N/A | 2040 |
| 1521483 | TCGCCTAATTTTTCTCTCAC | sooossssssssssssoss | 22455 | 22474 | N/A | N/A | 2679 |
| 1521506 | CTTTCCATTTCTTCAGTGCT | sooossssssssssssoss | 25622 | 25641 | N/A | N/A | 2661 |
| 1521598 | ATCCAATTATCCATCCCAGT | sooossssssssssssoss | 20000 | 20019 | 349 | 368 | 2434 |
| 1521613 | TTATCCAATTATCCATCCCA | sooossssssssssssoss | 20002 | 20021 | 351 | 370 | 2334 |
| 1521480 | TCGCCTAATTTTTCTCTCAC | soosoossssssssssoss | 22455 | 22474 | N/A | N/A | 2679 |
| 1521503 | CTTTCCATTTCTTCAGTGCT | soosoossssssssssoss | 25622 | 25641 | N/A | N/A | 2661 |
| 1521595 | ATCCAATTATCCATCCCAGT | soosoossssssssssoss | 20000 | 20019 | 349 | 368 | 2434 |
| 1521610 | TTATCCAATTATCCATCCCA | soosoossssssssssoss | 20002 | 20021 | 351 | 370 | 2334 |
| 1521469 | CTGTTTTACATTTTTTTTCC | soossossssssssssoss | 20591 | 20610 | N/A | N/A | 2040 |
| 1521484 | TCGCCTAATTTTTCTCTCAC | ssossssssssssossoos | 22455 | 22474 | N/A | N/A | 2679 |
| 1521507 | CTTTCCATTTCTTCAGTGCT | ssossossssssssossos | 25622 | 25641 | N/A | N/A | 2661 |
| 1521599 | ATCCAATTATCCATCCCAGT | soossossssssssssoss | 20000 | 20019 | 349 | 368 | 2434 |
| 1521614 | TTATCCAATTATCCATCCCA | soossossssssssssoss | 20002 | 20021 | 351 | 370 | 2334 |
| 1521472 | CTGTTTTACATTTTTTTTCC | soosssssssssssssoss | 20591 | 20610 | N/A | N/A | 2040 |
| 1521487 | TCGCCTAATTTTTCTCTCAC | soosssssssssssssoss | 22455 | 22474 | N/A | N/A | 2679 |
| 1521510 | CTTTCCATTTCTTCAGTGCT | soosssssssssssssoss | 25622 | 25641 | N/A | N/A | 2661 |
| 1521602 | ATCCAATTATCCATCCCAGT | soosssssssssssssoss | 20000 | 20019 | 349 | 368 | 2434 |
| 1521617 | TTATCCAATTATCCATCCCA | soosssssssssssssoss | 20002 | 20021 | 351 | 370 | 2334 |
| 1521481 | TCGCCTAATTTTTCTCTCAC | sosooossssssssssoss | 22455 | 22474 | N/A | N/A | 2679 |
| 1521504 | CTTTCCATTTCTTCAGTGCT | sosooossssssssssoss | 25622 | 25641 | N/A | N/A | 2661 |
| 1521596 | ATCCAATTATCCATCCCAGT | sosooossssssssssoss | 20000 | 20019 | 349 | 368 | 2434 |
| 1521611 | TTATCCAATTATCCATCCCA | sosooossssssssssoss | 20002 | 20021 | 351 | 370 | 2334 |
| 1521470 | CTGTTTTACATTTTTTTTCC | sossoossssssssssoss | 20591 | 20610 | N/A | N/A | 2040 |
| 1521485 | TCGCCTAATTTTTCTCTCAC | sossoossssssssssoss | 22455 | 22474 | N/A | N/A | 2679 |
| 1521508 | CTTTCCATTTCTTCAGTGCT | sossoossssssssssoss | 25622 | 25641 | N/A | N/A | 2661 |
| 1521600 | ATCCAATTATCCATCCCAGT | sossoossssssssssoss | 20000 | 20019 | 349 | 368 | 2434 |
| 1521615 | TTATCCAATTATCCATCCCA | ssossssssssssoossos | 20002 | 20021 | 351 | 370 | 2334 |
| 1521473 | CTGTTTTACATTTTTTTTCC | ssossssssssssosssos | 20591 | 20610 | N/A | N/A | 2040 |
| 1521488 | TCGCCTAATTTTTCTCTCAC | ssossssssssssosssos | 22455 | 22474 | N/A | N/A | 2679 |
| 1521511 | CTTTCCATTTCTTCAGTGCT | ssossssssssssosssos | 25622 | 25641 | N/A | N/A | 2661 |
| 1521603 | ATCCAATTATCCATCCCAGT | ssossssssssssosssos | 20000 | 20019 | 349 | 368 | 2434 |
| 1521618 | TTATCCAATTATCCATCCCA | sosssossssssssssoss | 20002 | 20021 | 351 | 370 | 2334 |
| 1521467 | CTGTTTTACATTTTTTTTCC | ssoooossssssssssoss | 20591 | 20610 | N/A | N/A | 2040 |
| 1521482 | TCGCCTAATTTTTCTCTCAC | ssoooossssssssssoss | 22455 | 22474 | N/A | N/A | 2679 |
| 1521505 | CTTTCCATTTCTTCAGTGCT | ssoooossssssssssoss | 25622 | 25641 | N/A | N/A | 2661 |
| 1521597 | ATCCAATTATCCATCCCAGT | ssoooossssssssssoss | 20000 | 20019 | 349 | 368 | 2434 |
| 1521612 | TTATCCAATTATCCATCCCA | ssoooossssssssssoss | 20002 | 20021 | 351 | 370 | 2334 |
| 1521471 | CTGTTTTACATTTTTTTTCC | sssooossssssssssoss | 20591 | 20610 | N/A | N/A | 2040 |
| 1521486 | TCGCCTAATTTTTCTCTCAC | sssooossssssssssoss | 22455 | 22474 | N/A | N/A | 2679 |
| 1521509 | CTTTCCATTTCTTCAGTGCT | sssooossssssssssoss | 25622 | 25641 | N/A | N/A | 2661 |
| 1521601 | ATCCAATTATCCATCCCAGT | sssooossssssssssoss | 20000 | 20019 | 349 | 368 | 2434 |
| 1521616 | TTATCCAATTATCCATCCCA | sssooossssssssssoss | 20002 | 20021 | 351 | 370 | 2334 |
| 1521474 | CTGTTTTACATTTTTTTTCC | ssssoossssssssssoss | 20591 | 20610 | N/A | N/A | 2040 |
| 1521489 | TCGCCTAATTTTTCTCTCAC | ssssoossssssssssoss | 22455 | 22474 | N/A | N/A | 2679 |
| 1521512 | CTTTCCATTTCTTCAGTGCT | ssssoossssssssssoss | 25622 | 25641 | N/A | N/A | 2661 |
| 1521604 | ATCCAATTATCCATCCCAGT | ssssoossssssssssoss | 20000 | 20019 | 349 | 368 | 2434 |

### Example 5: Activity of Modified Oligonucleotides Complementary to Human IFNAR1 in Transgenic Mice

[0648] Modified oligonucleotides described above were tested in a human IFNAR1 transgenic mouse model. Transgenic mice that express a human IFNAR1 transcript were generated.

[0649] Exons 1-6 and ˜4.9 kB of upstream sequence of the human IFNAR1 gene from fosmid ABCS-41091_400N2 was subcloned into a BAC, CTD-2289N21, containing exons 7-11 of the human IFNAR1 genes and 56 kB of downstream sequence, to generate a complete IFNAR1 transgene. The engineered BAC was digested with Not1 to remove the BAC backbone. The purified BAC fragment, containing the complete human IFNAR1 gene, was introduced into fertilized eggs from C57BL/6 mice by pronuclear injection to produce three founder lines. Line 17505 was used in the experiments described herein.

### Treatment

[0650] Transgenic mice were divided into groups of 2 mice each. Each mouse received a single ICV bolus of 200 or 300 μg of modified oligonucleotide. A group of 2-4 mice received PBS as a negative control.

### RNA Analysis

[0651] Two weeks post treatment, mice were sacrificed, and RNA was extracted from cortical brain tissue and spinal cord for RTPCR analysis to measure amount of IFNAR1 RNA using human primer probe set RTS44352 (described herein above). Results are presented as percent human IFNAR1 relative to PBS control, normalized to 18S ribosomal RNA. 18S ribosomal RNA was amplified using mouse 18S prime probe set PPS54360 (forward sequence GGAACTGAGGCCATGATTAAGA, designated herein as SEQ ID NO: 9; reverse sequence ACCTCCGACTTTCGTTCTTG, designated herein as SEQ ID NO: 10; probe sequence AAGACGGACCAGAGCGAAAGCAT, designated herein as SEQ ID NO: 11). The values marked by the symbol “†” indicate that the modified oligonucleotide is complementary to the amplicon region of the primer probe set. Additional assays may be used to measure the potency and efficacy of the modified oligonucleotides complementary to the amplicon region.

TABLE 50
Reduction of human IFNAR1 RNA in transgenic mice (n =
2) treated with 300 μg of modified oligonucleotide

| | |
|---|---|
| Compound | IFNAR1 RNA (% control) |

| ID | Spinal Cord | Cortex |
|---|---|---|
| PBS | 100 | 100 |
| 1321090 | 46 | 68 |
| 1321151 | 28 | 45 |
| 1321321 | 67 | 87 |
| 1321504 | 66 | 100 |
| 1321599 | 59 | 107 |
| 1321618 | 23 | 50 |
| 1321625 | 32 | 78 |
| 1321713 | 51 | 94 |
| 1321872 | 26 | 68 |
| 1321877 | 36 | 63 |
| 1321910 | 42 | 61 |
| 1321943 | 17 | 23 |
| 1321995 | 43 | 50 |
| 1322160 | 43 | 76 |
| 1322176 | 33 | 41 |
| 1322183 | 29 | 65 |
| 1322197 | 44 | 85 |
| 1322202 | 20 | 17 |
| 1322424 | 39 | 54 |
| 1322428 | 34 | 50 |
| 1322943 | 40 | 78 |
| 1322986 | 22 | 25 |
| 1323059 | 19 | 11 |
| 1323071 | 36 | 57 |
| 1413519 | 22 | 16 |
| 1413522 | 40 | 39 |
| 1413525 | 58 | 92 |
| 1413529 | 51 | 80 |
| 1413534 | 47 | 70 |
| 1413547 | 67 | 87 |
| 1413548 | 72 | 90 |
| 1413550 | 34 | 53 |
| 1413553 | 31 | 42 |
| 1413554 | 37 | 42 |
| 1413563 | 47 | 52 |
| 1413585 | 72 | 78 |
| 1413587 | 56 | 67 |
| 1413593 | 73 | 78 |
| 1413601 | 48 | 76 |
| 1413604 | 77 | 98 |
| 1413614 | 61 | 104 |
| 1413619 | 68 | 92 |
| 1413621 | 58 | 84 |
| 1413623 | 67 | 97 |
| 1413624 | 82 | 113 |
| 1413630 | 36 | 53 |
| 1413636 | 89 | 78 |
| 1413639 | 59 | 65 |
| 1413643 | 54 | 76 |
| 1413647 | 64 | 62 |
| 1413650 | 74 | 74 |
| 1413651 | 56 | 60 |
| 1413671 | 54 | 64 |
| 1413676 | 31 | 41 |
| 1413695 | 74 | 88 |
| 1413696 | 74 | 80 |
| 1413697 | 88 | 92 |
| 1413698 | 40 | 37 |
| 1413706 | 66 | 80 |
| 1413711 | 50 | 49 |
| 1413714 | 69 | 86 |
| 1413720 | 67 | 62 |
| 1413721 | 39 | 23 |
| 1413731 | 55 | 46 |
| 1413733 | 77 | 76 |
| 1413735 | 46 | 53 |
| 1413736 | 48 | 26 |
| 1413737 | 85 | 76 |
| 1413738 | 39 | 39 |
| 1413741 | 31 | 51 |
| 1413742 | 27 | 30 |
| 1413748 | 83 | 99 |

TABLE 51
Reduction of human IFNAR1 RNA in transgenic mice (n =
2) treated with 300 μg of modified oligonucleotide

| | |
|---|---|
| Compound | IFNAR1 RNA (% control) |

| ID | Spinal Cord | Cortex |
|---|---|---|
| PBS | 100 | 100 |
| 1321040 | 59 | 78 |
| 1321074 | 58 | 81 |
| 1321277 | 75 | 92 |
| 1321527 | 36 | 41 |
| 1321541 | 39 | 37 |
| 1321703 | 30 | 36 |
| 1321729 | 31 | 47 |
| 1321789 | 67 | 75 |
| 1322032 | 58 | 63 |
| 1322134 | 52 | 71 |
| 1322170 | 46 | 60 |
| 1322246 | 71 | 81 |
| 1322263 | 39 | 53 |
| 1322497 | 26 | 30 |
| 1322535 | 37 | 42 |
| 1322540 | 52 | 61 |
| 1322559 | 38 | 70 |
| 1322570 | 38 | 66 |
| 1322651 | 51 | 66 |
| 1322658 | 48 | 64 |
| 1322684 | 52 | 80 |
| 1323056 | 48 | 39 |
| 1323262 | 58 | 71 |
| 1413523 | 63 | 55 |
| 1413530 | 59 | 81 |
| 1413531 | 78 | 93 |
| 1413541 | 44 | 46 |
| 1413555 | 83 | 91 |
| 1413559 | 65 | 57 |
| 1413560 | 71 | 91 |
| 1413561 | 69 | 97 |
| 1413564 | 96 | 108 |
| 1413568 | 55 | 66 |
| 1413574 | 100 | 107 |
| 1413576 | 85 | 76 |
| 1413578 | 65 | 67 |
| 1413580 | 49 | 62 |
| 1413583 | 51 | 46‡ |
| 1413586 | 112 | 107 |
| 1413589 | 99 | 97 |
| 1413597 | 101 | 96 |
| 1413598 | 60 | 64 |
| 1413602 | 96 | 96 |
| 1413609 | 112 | 110 |
| 1413615 | 54 | 57 |
| 1413616 | 97 | 102 |
| 1413627 | 43 | 38 |
| 1413640 | 64 | 65 |
| 1413644 | 37 | 38 |
| 1413646 | 73 | 85 |
| 1413652 | 66 | 78 |
| 1413654 | 92 | 94 |
| 1413655 | 68 | 82 |
| 1413658 | 72 | 83 |
| 1413661 | 77 | 85 |
| 1413662 | 64 | 76 |
| 1413664 | 88 | 85 |
| 1413665 | 102 | 91 |
| 1413666 | 80 | 85 |
| 1413674 | 71 | 86 |
| 1413675 | 71 | 71 |
| 1413677 | 55 | 44 |
| 1413682 | 70 | 65 |
| 1413685 | 72 | 86 |
| 1413690 | 70 | 73 |
| 1413691 | 109 | 102 |
| 1413702 | 62 | 59 |
| 1413704 | 48 | 36 |
| 1413708 | 108 | 99 |
| 1413716 | 118 | 102 |
| 1413717 | 59 | 64 |

‡Indicates fewer than 2 samples available

TABLE 52
Reduction of human IFNAR1 RNA in transgenic mice (n =
2) treated with 200 μg of modified oligonucleotide

| | |
|---|---|
| Compound | IFNAR1 RNA (% control) |

| ID | Spinal Cord | Cortex |
|---|---|---|
| PBS | 100 | 100 |
| 1320892 | 82 | 93 |
| 1320910 | 55 | 86 |
| 1320934 | 83 | 97 |
| 1320943 | 93 | 101 |
| 1321027 | 82 | 94 |
| 1321049 | 63 | 81 |
| 1321056 | 25 | 49 |
| 1321060 | 69 | 89 |
| 1321103 | 63 | 89 |
| 1321187 | 53 | 49 |
| 1321222 | 63 | 80 |
| 1321287 | 82 | 88 |
| 1321293 | 73 | 78 |
| 1321324 | 72 | 104 |
| 1321366 | 50 | 60 |
| 1321453 | 31 | 49 |
| 1321456 | 102 | 107 |
| 1321686 | 67 | 78 |
| 1321752 | 77 | 88 |
| 1321801 | 42 | 83 |
| 1321811 | 76 | 105 |
| 1321812 | 50 | 60 |
| 1321817 | 49 | 75 |
| 1321866 | 93 | 104 |
| 1321973 | 68 | 86 |
| 1321979 | 81 | 89 |
| 1322058 | 43 | 64 |
| 1322064 | 65 | 88 |
| 1322077 | 96 | 102 |
| 1322112 | 85 | 95 |
| 1322140 | 65 | 99 |
| 1322164 | 67 | 86 |
| 1322187 | 27 | 41 |
| 1322188 | 84 | 80 |
| 1322237 | 84 | 93 |
| 1322282 | 101 | 111 |
| 1322293 | 83 | 98 |
| 1322309 | 81 | 113 |
| 1322316 | 45 | 72 |
| 1322369 | 60 | 93 |
| 1322504 | 54 | 49 |
| 1322564 | 95 | 105 |
| 1322625 | 74 | 97 |
| 1322671 | 84 | 89 |
| 1322696 | 65 | 51 |
| 1322716 | 64 | 81 |
| 1322717 | 76 | 88 |
| 1322720 | 97 | 88 |
| 1322731 | 91 | 85 |
| 1322800 | 72 | 70 |
| 1322827 | 81 | 98 |
| 1322918 | 79 | 112 |
| 1323015 | 88 | 101 |
| 1323053 | 46 | 40 |
| 1323107 | 85 | 100 |
| 1323169 | 26 | 32 |
| 1323251 | 64 | 89 |
| 1323277 | 98 | 99 |
| 1413535 | 50 | 56 |
| 1413551 | 50 | 53 |
| 1413562 | 89 | 120 |
| 1413591 | 99 | 107 |
| 1413600 | 78 | 78 |
| 1413608 | 62 | 98 |
| 1413637 | 75 | 88 |
| 1413638 | 62 | 70 |
| 1413653 | 94 | 97 |
| 1413663 | 77 | 83 |
| 1413669 | 92 | 91 |
| 1413679 | 91 | 98 |
| 1413715 | 63 | 80 |
| 1413724 | 91 | 105 |
| 1413734 | 71 | 79 |
| 1413743 | 82 | 96 |
| 1413745 | 101 | 109 |
| 1413746 | 74 | 91 |

TABLE 53
Reduction of human IFNAR1 RNA in transgenic mice (n =
2) treated with 300 μg of modified oligonucleotide

| | |
|---|---|
| Compound | IFNAR1 RNA (% control) |

| ID | Spinal Cord | Cortex |
|---|---|---|
| PBS | 100 | 100 |
| 1413521 | 65 | 82 |
| 1413567 | 74 | 85 |
| 1413570 | 59 | 58 |
| 1413579 | 83 | 89 |
| 1413588 | 90 | 100 |
| 1413596 | 77 | 89 |
| 1413603 | 69 | 94 |
| 1413605 | 68 | 83 |
| 1413625 | 89 | 104 |
| 1413631 | 71 | 81 |
| 1413656 | 90 | 81 |
| 1413660 | 76 | 94 |
| 1413667 | 81 | 92 |
| 1413668 | 43 | 48 |
| 1413670 | 71 | 80 |
| 1413692 | 63 | 60 |
| 1413701 | 52 | 45 |
| 1413722 | 73 | 79 |
| 1413740 | 53 | 64 |

TABLE 54
Reduction of human IFNAR1 RNA in transgenic mice (n =
2) treated with 300 μg of modified oligonucleotide

| | |
|---|---|
| Compound | IFNAR1 RNA (% control) |

| ID | Spinal Cord | Cortex |
|---|---|---|
| PBS | 100 | 100 |
| 1321374 | 61 | 44 |
| 1321408 | 29 | 12 |
| 1321541 | 27 | 18 |
| 1322611 | 29 | 27 |
| 1323169 | 17 | 18 |
| 1323224 | 46 | 53 |
| 1410683 | 55 | 61 |
| 1489455 | 47 | 47 |
| 1489456 | 47 | 65 |
| 1489457 | 48 | 52 |
| 1489462 | 36 | 46 |
| 1489468 | 93 | 79 |
| 1489471 | 28 | 69 |
| 1489472 | 18 | 24 |
| 1489473 | 53 | 71 |
| 1489474 | 39 | 64 |
| 1489475 | 54 | 93 |
| 1489478 | 49 | 64 |
| 1489480 | 38 | 44 |
| 1489481 | 40 | 52 |
| 1489482 | 41 | 49 |
| 1489483 | 13 | 17 |
| 1489484 | 35 | 43 |
| 1489485 | 24 | 38 |
| 1489486 | 31 | 30 |
| 1489487 | 20 | 19 |
| 1489488 | 89 | 104 |
| 1489491 | 75 | 92 |
| 1489493 | 31 | 18 |
| 1489494 | 18 | 8 |
| 1489497 | 22 | 14 |
| 1489498 | 31 | 48 |
| 1489500 | 36 | 70 |
| 1489508 | 29 | 31 |
| 1489514 | 29 | 26 |
| 1489519 | 15 | 11 |
| 1489524 | 22 | 14 |
| 1489525 | 32 | 25 |
| 1489531 | 45 | 46 |
| 1489532 | 36 | 37 |
| 1489533 | 16 | 19 |
| 1489534 | 25 | 35 |
| 1489535 | 22 | 18 |
| 1489536 | 34 | 39 |
| 1492042 | 65 | 87 |
| 1492045 | 67 | 87 |
| 1492046 | 70 | 87 |
| 1492047 | 36 | 39 |
| 1492048 | 21 | 24 |
| 1492054 | 55 | 64 |
| 1492069 | 23 | 24 |
| 1492075 | 29 | 36 |
| 1492081 | 49 | 55 |
| 1492089 | 28 | 41 |
| 1492125 | 71 | 100 |
| 1492126 | 65‡ | 82 |
| 1492127 | 48 | 71 |
| 1492128 | 29 | 41 |
| 1492129 | 15 | 19 |
| 1492130 | 17 | 19 |
| 1492131 | 20 | 28 |
| 1492132 | 33 | 36 |
| 1492140 | 26 | 22 |
| 1492141 | 14 | 15‡ |

‡Indicates fewer than 2 samples available

TABLE 55
Reduction of human IFNAR1 RNA in transgenic mice (n =
2) treated with 300 μg of modified oligonucleotide

| | |
|---|---|
| Compound | IFNAR1 RNA (% control) |

| ID | Spinal Cord | Cortex |
|---|---|---|
| PBS | 100 | 100 |
| 1322169 | 25 | 45 |
| 1322187 | 22 | 20 |
| 1322319 | 31 | 54 |
| 1322364 | 42 | 39 |
| 1322927 | 68† | 73† |
| 1323067 | 54 | 51 |
| 1323084 | 31 | 44 |
| 1323172 | 41 | 34 |
| 1489458 | 47 | 51 |
| 1489459 | 46 | 38 |
| 1489461 | 55 | 67 |
| 1489463 | 33 | 31 |
| 1489464 | 37 | 46 |
| 1489467 | 42 | 45 |
| 1489469 | 37 | 46 |
| 1489476 | 43 | 63 |
| 1489477 | 32 | 27 |
| 1489479 | 55 | 79 |
| 1489489 | 38 | 43 |
| 1489503 | 55 | 66 |
| 1489505 | 50 | 52 |
| 1489513 | 37 | 43 |
| 1489515 | 25 | 33 |
| 1489516 | 36 | 48 |
| 1489517 | 45 | 57 |
| 1489518 | 35 | 32 |
| 1489520 | 34 | 35 |
| 1489527 | 54 | 59 |
| 1492035 | 64 | 69 |
| 1492036 | 40 | 40 |
| 1492037 | 29 | 23 |
| 1492038 | 43 | 42 |
| 1492039 | 34 | 40 |
| 1492040 | 59 | 73 |
| 1492041 | 47 | 56 |
| 1492043 | 59 | 76 |
| 1492044 | 60 | 80 |
| 1492051 | 81 | 89 |
| 1492052 | 92 | 87 |
| 1492053 | 65 | 82 |
| 1492055 | 63 | 75 |
| 1492056 | 55 | 79 |
| 1492067 | 82 | 87 |
| 1492068 | 55 | 56 |
| 1492074 | 69 | 62 |
| 1492076 | 38 | 37 |
| 1492077 | 29 | 34 |
| 1492078 | 49 | 47 |
| 1492080 | 67 | 80 |
| 1492082 | 19 | 10 |
| 1492087 | 39 | 59 |
| 1492088 | 29 | 28 |
| 1492090 | 37 | 36 |
| 1492091 | 45 | 72 |
| 1492092 | 35 | 46 |
| 1492122 | 62 | 84 |
| 1492123 | 46 | 59 |
| 1492124 | 71 | 97 |
| 1492136 | 54 | 72 |
| 1492137 | 15 | 29 |
| 1492138 | 22 | 25 |
| 1492139 | 30 | 28 |
| 1492142 | 35 | 41 |
| 1492143 | 42 | 64 |
| 1492069 | 20 | 18 |
| 1492070 | 56 | 67 |
| 1492071 | 65 | 85 |
| 1492075 | 26 | 55 |

TABLE 56
Reduction of human IFNAR1 RNA in transgenic mice (n =
2) treated with 300 μg of modified oligonucleotide

| | |
|---|---|
| Compound | IFNAR1 RNA (% control) |

| ID | Spinal Cord | Cortex |
|---|---|---|
| PBS | 100 | 100 |
| 1521445 | 38 | 38 |
| 1521446 | 27 | 25 |
| 1521447 | 24 | 33 |
| 1521448 | 27 | 25 |
| 1521449 | 27 | 29 |
| 1521467 | 23 | 11 |
| 1521468 | 30 | 26 |
| 1521469 | 26 | 20 |
| 1521470 | 44 | 43 |
| 1521471 | 31 | 15 |
| 1521472 | 34 | 27 |
| 1521473 | 35 | 34 |
| 1521474 | 37 | 27 |
| 1521478 | 23 | 24 |
| 1521479 | 23 | 22 |
| 1521480 | 29 | 24 |
| 1521481 | 26 | 17 |
| 1521482 | 25 | 29 |
| 1521483 | 26 | 13 |
| 1521484 | 25 | 26 |
| 1521485 | 27 | 21 |
| 1521486 | 26 | 23 |
| 1521487 | 30 | 24 |
| 1521488 | 27 | 25 |
| 1521489 | 32 | 25 |
| 1521493 | 21 | 23 |
| 1521494 | 27 | 33 |
| 1521495 | 33 | 35 |
| 1521496 | 24 | 32 |
| 1521497 | 28 | 22 |
| 1521498 | 28 | 37 |
| 1521499 | 27 | 20 |
| 1521500 | 19 | 24 |
| 1521502 | 29 | 13 |
| 1521503 | 21 | 27 |
| 1521504 | 21 | 14 |
| 1521505 | 27 | 28 |
| 1521506 | 22 | 23 |
| 1521507 | 31 | 29 |
| 1521508 | 21 | 14 |
| 1521509 | 35 | 31 |
| 1521510 | 22 | 18 |
| 1521511 | 23 | 16 |
| 1521512 | 17 | 11 |
| 1521593 | 21 | 19 |
| 1521594 | 20 | 21 |
| 1521595 | 22 | 20 |
| 1521596 | 16 | 19 |
| 1521597 | 25 | 22 |
| 1521598 | 16 | 17 |
| 1521599 | 22 | 22 |
| 1521600 | 22 | 27 |
| 1521601 | 21 | 18 |
| 1521602 | 23 | 24 |
| 1521603 | 20 | 21 |
| 1521604 | 30 | 28 |
| 1521608 | 42 | 19 |
| 1521609 | 21 | 22 |
| 1521610 | 28 | 16 |
| 1521611 | 29 | 28 |
| 1521612 | 30 | 23 |
| 1521613 | 32 | 23 |
| 1521614 | 26 | 17 |
| 1521615 | 27 | 18 |
| 1521616 | 38 | 43 |

TABLE 57
Reduction of human IFNAR1 RNA in transgenic mice (n =
2) treated with 300 μg of modified oligonucleotide

| | |
|---|---|
| Compound | IFNAR1 RNA (% control) |

| ID | Spinal Cord | Cortex |
|---|---|---|
| PBS | 100 | 100 |
| 1521617 | 20 | 16 |
| 1521618 | 29 | 41 |

### Example 6: Potency of Modified Oligonucleotides Complementary to Human IFNAR1 RNA in Transgenic Mice

[0652] Modified oligonucleotides described above were tested in human IFNAR1 transgenic mice (described herein above).

### Treatment

[0653] Human IFNAR1 transgenic mice were divided into groups of 4 mice each. Each mouse received a single ICV bolus of modified oligonucleotide at the doses indicated in tables below. A group of 4 mice received PBS as a negative control.

### RNA Analysis

[0654] Two weeks post treatment, mice were sacrificed, and RNA was extracted from the spinal cord, cortex, and cerebellum for quantitative real-time RTPCR analysis of RNA expression of IFNAR1 using primer probe set RTS44352 (described herein above). Results are presented as percent human IFNAR1 RNA relative to PBS control, adjusted to 18S PCR (described herein above).

[0655] The half maximal effective dose (ED₅₀) of each modified oligonucleotide was calculated using GraphPad Prism 7 software (GraphPad Software, San Diego, CA). ED₅₀ values were calculated from dose and individual animal IFNAR1 RNA levels using custom equation: Agonist vs response−Variable slope (four parameters) Y=Bottom+(Top−Bottom)/(1+(10\hat{ }log ED50/X)\hat{ }HillSlope), with the following constraints: bottom>0, top=100.

[0656] As shown in the table below, treatment with modified oligonucleotides resulted in dose-responsive reduction of IFNAR1 RNA in comparison to the PBS control.

TABLE 58
Reduction of human IFNAR1 RNA in transgenic mice

| | | Spinal Cord | | Cortex | | Cerebellum | |
|---|---|---|---|---|---|---|---|
| | | IFNAR1 | | IFNAR1 | | IFNAR1 | |
| Compound | Dose | RNA (% | ED₅₀ | RNA (% | ED₅₀ | RNA (% | ED₅₀ |
| ID | (μg) | control) | (μg) | control) | (μg) | control) | (μg) |
| PBS | N/A | 100 | N/A | 100 | N/A | 100 | N/A |
| 1489493 | 10 | 96 | 154 | 89 | 243 | 87 | 350 |
| | 30 | 62 | | 69 | | 68 | |
| | 100 | 71 | | 79 | | 77 | |
| | 300 | 40 | | 42 | | 51 | |
| | 700 | 32 | | 26 | | 38 | |
| 1489494 | 10 | 100 | 79 | 85 | 92 | 81 | 105 |
| | 30 | 73 | | 83 | | 75 | |
| | 100 | 49 | | 50 | | 51 | |
| | 300 | 22 | | 15 | | 31 | |
| | 700 | 13 | | 6 | | 19 | |
| 1489525 | 10 | 77 | 319 | 79 | 31 | 78 | 215 |
| | 30 | 60 | | 32 | | 51 | |
| | 100 | 75 | | 63 | | 71 | |
| | 300 | 50 | | 24 | | 46 | |
| | 700 | 43 | | 21 | | 37 | |
| 1489535 | 10 | 99 | 114 | 83 | 88 | 72 | 133 |
| | 30 | 88 | | 73 | | 73 | |
| | 100 | 64 | | 56 | | 59 | |
| | 300 | 30 | | 16 | | 37 | |
| | 700 | 22 | | 7 | | 26 | |
| 1492037 | 10 | 118 | 83 | 85 | 17 | 81 | 155 |
| | 30 | 73 | | 39 | | 64 | |
| | 100 | 60 | | 37 | | 61 | |
| | 300 | 37 | | 24 | | 43 | |
| | 700 | 26 | | 16 | | 29 | |
| 1492069 | 10 | 96 | 104 | 84 | 47 | 74 | 129 |
| | 30 | 80 | | 69 | | 75 | |
| | 100 | 60 | | 34 | | 48 | |
| | 300 | 28 | | 20 | | 43 | |
| | 700 | 23‡ | | 12 | | 29 | |
| 1492082 | 10 | 98 | 177 | 75 | 50 | 76 | 142 |
| | 30 | 53 | | 46 | | 55 | |
| | 100 | 71 | | 46 | | 66 | |
| | 300 | 41 | | 15 | | 39 | |
| | 700 | 29 | | 14 | | 33 | |
| 1492131 | 10 | 114 | 83 | 77 | 32 | 77 | 105 |
| | 30 | 92 | | 63 | | 68 | |
| | 100 | 57 | | 24 | | 48 | |
| | 300 | 39 | | 21 | | 40 | |
| | 700 | 27 | | 13 | | 23 | |
| 1521512 | 10 | 113 | 29 | 79 | 18 | 70 | 12.5 |
| | 30 | 53 | | 32 | | 44 | |
| | 100 | 50 | | 33 | | 45 | |
| | 300 | 31 | | 9 | | 33 | |
| | 700 | 20 | | 7 | | 27 | |

‡Indicates fewer than 4 samples available

TABLE 59
Reduction of human IFNARI RNA in transgenic mice

| | | Spinal Cord | | Cortex | | Cerebellum | |
|---|---|---|---|---|---|---|---|
| | | IFNAR1 | | IFNAR1 | | IFNAR1 | |
| Compound | Dose | RNA (% | ED₅₀ | RNA (% | ED₅₀ | RNA (% | ED₅₀ |
| ID | (μg) | control) | (μg) | control) | (μg) | control) | (μg) |
| PBS | N/A | 100 | N/A | 100 | N/A | 100 | N/A |
| 1489477 | 10 | 86 | 91.9 | 100‡ | 245 | 98 | 480 |
| | 30 | 77 | | 96 | | 88 | |
| | 100 | 54 | | 72 | | 74 | |
| | 300 | 29 | | 51 | | 62 | |
| | 700 | 24 | | 28 | | 41 | |

‡Indicates fewer than 4 samples available

The application's sequence listing, which the Patent Office published only in electronic form, follows.

SEQUENCE LISTING (2687 sequences)

SEQ ID NO: 1 - DNA, 42000 bp, Homo sapiens
tttcaagatacataaattatacctctaagatgtttttaaaataggcatatttcccctgggcgtggtgactcacgcctgcaatcccagcactccgggaagcaaaggtgagcggatcacttcaggtcaggagttccagaccagcctgggtaacacagcggaaatcccatctccactaaaaatacaaaaactagccgggcgcaatagcgcacagctgtaatctcagctactcaggaggctgaagcaggagaatcgcttgaacccggaaggcggaggttgtggtgagccgagatcgcgccactgcactccagcccgggtgacagagcaagactccgattcgaacaatgcaatggaatatatacatatatgtatatatggaacatatatacatatgtggaacaaatacatatatggaacatacatatgtggaacaaatacatatatggaacatacatatgtggaaccaatacatatatggaacatacatatgtggaaccaatacatatatgcaacatacatatgtggaaccaatacatatatgcaacatatatatgtggaaccaatacatatatgcaacatatatatgtggaaccaatacatatatgcaacatatatatgtggaaccaatacatatatgcaacatatatatgtggaaccaatacatatatgcaacatatatatgtggaaccaatacatatatgcaacatatatatgtggaaccaatacatatatgcaacatatatatgtggaaccaatacatatatgcaacatatatatgtggaaccaatacatatatagaacatatatatgtggaaccaatatatatggaacatacgtatgtggaacatacatatgtggaacatacgtatgtggaccatacatatgtggaacatacgtatgtggaccatacatatgtggaacatacgtatgtggaccatacatatgtgaaacatacgtatgtcgaccatacgtatgggtcccatatacatatgggacacatacgtatggaatatatatatgggacacatacgtatggaatatatacgtatatatacatatgggacacatacgtatggaatatacatatggaatatacatatatgggacacataagtatggaatatatacgtatggaatatacacgcatggaatatatacgtatggaatatatatgtatggaatatacacgtctggaatatatatgtatggaatattcacgtatggaatatatatctggaatatatatatatggaatatatatctggaatatatatatggaatatatatctggaatatatatatatggaatatatatctggaatatatatatatggaatatatatctggaatatatatatggaatatatatctggaatatatatatatggaatatatatctggaatatatatatatggaatatatatatggaatatatatatatggaatatatatggaatatatatatatggaatatatatatgcaatatacatatatggaatatatatatgcaatatacatatatggaatacatatatgcaatatatatatggaatatatatatggaatatatatatggaatatatatataatatatatacggaatatatatatacggaatatatatataatatatatacggaatatatatatacggaatatatatataatatatatacggaatatatatatacggaatatatatataatatatatataatatatatacggaatatatatatacggaatatatatataatatatgtatggaatatatatatacggaatatatatataatatatgtatggaatatatatatacggaatatatatataatatatgtatggaatatatatatacggaatagatatataatatatgtatggaatatatatatacggaatatatatataatatatatatatggcatatatacatggaatatatatatatggaatatatacatggaatatatatatatggaatatatacatggaatatatatatatggaatatatacatggaatatatatatatggaatatatacatggaatatatatatatggaatatatacatggaatatatatatatggcatatatacatggaatatatatatatggcatatatacatggcatatatatatatggcatatatatatatggcatatatatatggcatatatatatatggcatatatatatggcatatatatatatggcatatatatatggcatatatatatatggcatatatatatggcatatatatatatggcatatatatatggcatatatatatatggcatatatatatggcatatatatatggcatatatatatggcatatatatatggcatatatatatggctatagagatggcatatatatatggcatatagagatggcatatagagatggcatatagagatggcatatagagatggcatatagagatggcatatagagatggcatatagagatggcatatagagatggaatatagagatggaatatatatggcatatagagatggaatatatatggcatatagagatggaatatatatggcatatagagatggcatatagagatggaatatagagatggaatatagagatggaatagatatggaatatagagatggaatagatatggaatatagagatggaatagagatggaatatagagatggaatatagagatgggatatagagatgggatatagagatgggatatagagatgggatatagagatgggatatagagatgggatatagtgatggaatatagagatgggatatagagatggaatagatatggaatatagagatggaatagatatggaatatagagatggaatagatatggaatatagagatggaatatagagatgggatatagagatgggatatagagatggaatatagagatgggatatagagatggaatatagagatgggatatagagatggaatatagtgatgggatatagagatggaatatatagatggaatatagagatggaatatatagatggaatacatatatattccattgcattgttctttacaaacattcatttaattatgtaattgctaattaattgcttggttgttataacaacgaagtatttgattccttattttatctcatcatttaaattttatttcgcatattttcacaatgcactggatctattactgaggaatttaattaaataatcattcgaaccatgggctcgaattgtttactgataaagcccgacgaccaaaacagcctagcgactgctgtttggagcccctcggcccagggcccgtggctgttctctccaagggaccatctcgcccctcagccaagtcgcccggaaaacgagcgctcgaccgcctctgccccgctctcgctctgcacacagcaacggtctggtcgctcagccacttcctccttccagcctcatctggttcccaggccgctggggactcccaacgccactgtccaagactctagggtcagcaagcgccccgggcggagaagggcgaggacgaagagcgccgggccgcgaccaggagcccacccgcgccctccgactgcagacatggggaagagacgcgggaactccaaagtcgctgggtctgcgcaggtgtgtgccgcgatcctgtgaaggtcaaggcctcctgtgagggggagtcgtcctggaatgcgatggtgaagtgctccagaccggccataggccggaaagagtgaggaagaagagaatgcaggaggcctgcgatttctaaggcgcgcgcgcacaggggtgctgcaattaggatggggcaatgggagcttggagaaggggtgctagctaggaggaaaggcgcgtgcgtggaggaacggcgcgtgcgcggaggggcggtgtgtgtgtcagaagaggcggcgcgtgcgtagaggggcggtgagagctaagaggggcagcgcgtgtgcagaggggcggtgtgacttaggacggggcgatggcggctgagaggagctgcgcgtgcgcgaacatgtaactggtgggatctgcggcggctcccagatgatggtcgtcctcctgggcgcgacgaccctagtgctcgtcgccgtggcgccatgggtgttgtccgcagccgcaggtgagaggcggggaggagagtcttggcgcagggcgggaggtagggcacgcagctgggctacgggggcggcgatgctgttgggggcgacagacgcccagtctgggaaaccttcggtccactttgccgcgccaaagattaaacccgacctgggctcgcaaatcaaccaggagaaagtggtgttctgggtcctctcttgccgcttgcctgtggccgtgtacgggtcctcgggagcgcccgggtcccacccccgtgaaatggcggtgccagagctttgtgtcgagtttgattctttccgggaaagtaccgcggctccgctggtctgtttgataataaacaaaacatttcccgaaatgcatttcctcaatctggtgaataggcgcccagtcccacgggggagtgagctaagtgtggccaggatttctctgccctcaggattcatacaggccaataaaaaatgacagtcggagtgactgaagcataattgtcagttctcgaggtttactaagcctgcttcagggcgcatccgggaaaaacgtgagccacaaacacgtctgtgactggttttccagaggttttcaggaggtggggcaggaaggcagtaaggcaaatagttctgtgagaatttagttagtgcccaagaaatctgtattttaagataccatgagtgtcttgaagagaaaaagagagtaaagggagtcagttatgcagatgcctctgggtagatggagtcttgactttgttttgcacctgagaagataagcttgtaattgacatggtcagtgtggaaggcctgaactagtttttcagattaactttggaatgccatttgttgagaggagaggtccattcacattgttggggggcttagaattttatttttggtttacttaactacctacttttttcccaaagaaataatcatgttcaaaactcaatgaaatgttatctcaatgagattgtaatgttgctcagtctttcagaagtcataaaaatagtcatactttttaaactagtaaatgcaattctaggacccaagactaagaaaactgtccaaaatatgggaagacatttttatttatacttttttttttttttttttgagacagcctgttgcccaggctggtgtgcagaggcgtgatctcagctcactgcaacctctgcctcccaggttcaggcgattctcctgcctcagcctcttgagtagctggaattacaggtgcacgccaccacatccggctattttttgtatttctagtagagatggggttttgccatgttggccaggctggtctcgaactcctgacctcaaacaatccacttcagcctcccaaagtgctgggattacaggtgtgagccaccacgcccgatctatttatgttttagactttagttttaggaactagacttaggttgtagacctgaagttacagttggcatccccttgtttatgggagaccagcaaagaattgacttatgaatgatctgtcagggtagcccttcgcagatggctgagtctttttatccttccttggggatttggctgaagcataatgctagtaacagccattcgtttggaagagggtgttgcagtcacttggcctctgggcttaactaacttcccttttgcgtaagaaagttgggagaggtcctgagatttttttttttcttttacaaaaataataaaagaaaaatacaaaggcagggcgtcaccaggctaatttgctgaaattcttcatacttacttgggatgcatgggggaatggcaactattacaaggttgatagagagtgagaggtaattttgtagtgaggaggggtacccaaagagaatcagggctagcatcccagtgcaggagtccaggtggtctgtgagcctgcaagtgagttcaaaatactttacctgttggcttaggaaaccatatacctgtgtggtacatgatatcctatttctcaaacttttccacaaatatgtagtatacttttcctaggatgtgggtactagggtcctggtgcatcccatagtaatttctttgaagtcttttgtttatgaaaaacttgcattaaactcatgtttggtttgatgtgaaaaaagctttcccagaattttcatataaaattgacattccaggagggtgtgcattaagaaattaatttaaaattaggttagcggacaggtggcaagatataatttataggcatttatcatttcttaagctcttagctgtgtgccaggcagtaatctaagtgttttaaaggtataaactcattaagctttcagagcagtgtagatactgttatgcttagttaacagacaaggaaactgagcaacggagagatcaagtaacttgcctgaggctgtataggccagtccgtggaggagtgggaagtcaaatcctgagtctggactaatagccttggggcttaaccagactagactgttttcccaaaggccaaacaatttaaattcctgattgtccacttgtatgttaagggcctaattatcagtatctttcagttaactgtgagcccaaaaatatctgagaccggtctgaaatcaacttagaaagtttattttgccaaggttaaggatgcattcatgacacagcctcaagaggtcctggccacatgtgcccaaggtggtcaaggtccagcttgcttttatacattttagggagacatatcaatcagtacatctaagatgtacatttgattggttcgatctggaaaggcaggacaactcaaagcaaggcttccaggtcataggtagatttaaagattttctgattggtaattggttgaaatcaatggaaaggaatgtctgggatgtcctaaggggttgtggagaccaaaattttatcatgcagatcaagcttgtccaacccacagcccactggccgcgtgcagcccatgatggctttgaatgcagtccaacacaaattcgtaaactttcttaaaacatgaggggtttttgttttgtttgttttctttctgtttttttgtttgtttgtttttagctcatcagatattgttagtgtattttgtgtgtggcccaagacagttgttcttccagtgtggcccacggaagcaaaaagagtggacacccttgatgcagatgaggcctgcagatagcaggcttcagagagaatagattgtaactgtttcttgtgaaacttaacgtctgtgttgttgttaatggtggttagctttttctgaattccagaagagaggagggtataatgaggcatatccaaacctcacttcgcatcatggcctgaagtagtttttcaggttagctttggaatgcccttggtcaggagaaggggtccattctgatggttgggggacttagaattttatttttggtttacgtaactatctactttttccccaaaaaaaatcatgttgaaaactcaagaccttaagtttacagctcaagctgatcctgaaagttatctcagtgagattgtaatgttgctcagtctttcagaagttgtataaatgtaccttttagcctagtaaatgcaattctaggactctagattaagaaaactatccaaaatatgggaagacatttacttacatatttgtacagatatctatatttggatttatgtcagacttaaagatatagtaaaccattttggtcgtgaaaatgaatgtgaaaggttgaaagcaaccaaaattataaatgcattatatatatattagattaaatgtccatttatacatttacatgtggggtaattaattgttaatatactaatataaaacattttaatatactagtaaattaatatattgtatgttaatgttacataacaatttatgaaaaaattattaaaaggagattgccaataataatagagcaaaatctgtgaaaactaaaatcctgtttaataactttatttccaagcccctgtccatttatcagtcagttatttgttggtcttccaaatgccaacatgcctgtaacttcagggtctccttcttttagcagtaaaggattttttttctccctgaggaaatcactagctgtaccctataacattttctattcttgtctcaaggcccaaaattactagaattataatattctgcacaagatattgtaaatactacaaatgccatcagatcttttgttaaactctgtaaacccagttgctaccctttggctgcatagaatctataaattctaacaaatggatgagaaccaagttaagaattctagagtgggataaggggatgtgatgtattctattcagggatgaagttttagagactccaagtatgaaacagaaaattgaggatggggagacctgatgggtaccacattaagtttaaaaaaaaaaaaagtgttttctcagctgtctccccttttgaccccatactataagatctaactggaaagagcaagaagctgtctcagttaagaaagttctatacaagaacccctgtggtagaacaagtctacaacaagataacatgattgccccaaggcagaagtaaaagaaatattgtaggaaccataaatgaatttaaaagctgatcttttaaaaaatatataacttatcaaagtgagagatcagtcctttatgatatttaaggagttcctgtgaatgcaccattatgctggatactctgaaaaaatgcaaatcaagtatgaagcgatataaattctgcccttaaggaacttgcaatctagttggagatttatgtttaacacaaagaagcagtttttacaaatacttcttttgaggattctgggaagatggcagagtagaaagcaccaggaatctgtctcctcacctagacaagaattgtactggcagaatctgatgtaactattttggaactctggagtctattgcaggcttgcaacttccaggggacagacttagatggtaaattgcagttaattttggtctatttgagctcttagtacagtagcagctacccatcttccacctctcaacccttagcagacagctgtgcacgttattagagcaatctgcacacaacttacaggaatcaggtgggcaaaaagaaacacaccatccagatatctgggatctgtgctcttgattggtcattgctccttctcgtcacaaaagcgcaaagagatgggcggttgttgttgttacaccttactcattgttacaaccccctccccactcactcccctgccccatggatttaaagggctagaaatctccctctgcttcatttttctctttcacttttgggagccggatattaaagactaggacatttaaaaacaactgcatttatggggaaaattagaaagtcactgtacatacctagggaaaggctcaggagagaccttaagtttatagctcaagctgatccttggcacaggattaacaacaattacacagcaattaaacaaagcaaacacacacacacacaatgtagtctgggagagtgatgttagcaagatggccaactagaagccccttctgctcatcccctcataagacagccagaacaacaaataaacaactacattttagcaaacttaactaagagtgctagagtgcatcaaagaagtaacagaaatcctagtgagcagagaaaagtgggatggccacatggagaatgggaggaaatgccaggattcctaggatcatctgggaacgaggaggaacttcttcctatggcaaggagataaacaagaagatcccagctacaccatgggcaccaacagatctcaccactggggttccttagagtccagacagcaactaagccaagctgaggaagctgcctagagtctgcacagctgtgttccctccagagaaggagccaacactgtgctccacctgctgtggcccacacagctactgtgccactccaccttggaactggaactacttctggagtgtgtcttgcttcggggacttgtagccatggcttcctttcatctgaaccacgccaggctggtggctcaacatccctaagctaaactttaagcagctgttacacccttccctgtggagtcaagcagaggtggaactactccacctactcctaccccactgcccttgggctagagctgaagcagtatcctatttcctgggaacacactaccttggccacccagagcagtcatgcacccctgtgcctaagctgaagtggtatacggcattccagggaaacagggcctgaaccacccagagcagtcacactccccgggcctcagctgaaggagcacatcactccctgcagaatcagtgccctggccaaaccgagcagctatgcatcccagggctgagctgatgtagtatcctatgtctcagggaaacagagcagtggctgagctgagacaccctgttctacaggccaaataactgtagtaccccgcttccctggagctggactagtcctctagagcctgagctgctgagacactctgaggagtggagtcatcactgtgctgttccctaccccccattcccagcccagacaacagctatgcttcaccattttgtagtacttgctgctgctgctacacttggcctcacagtctggggtactgcttatccctagctattccaagatttagagtcatgacttcatggtgcctcatcccttgggacctgtgttgccactgagccctattagctcatattcccaaattaaaaccataccctgctccccaggcccaaacctccagagaaccccttctttatagtcaggccagtgctatgccctgacccccataggggtagaatcaaagctacaacccattctctgggcctaagctgccaggaagcacctccaggtcacaaatcctggctctgtgagcaactacgtccaagccctgccacagagagcaaacccacctcagcaaccaagtgtctcagtaggtttgtgagatcctgagcctaggacctttgcccagtagccactctgaataccttcatctggaatcaagagctgctgcagctgcatatatatagcccctgtcagacctgacaccaagaggtgttgccttggctgagtctccccattgtggggaagacaagaataggaggatcctaaaagccttcaacactgagaacattaacaacctacactaccactgccacaaacttctgcagcctaggcccctgaggcacccatttactactgacattgaacacaggtaaagcagctgctttaccataccactgcatctgtcaggaaacagtcaccacacccttcgaaaccagcatactgaaacccaactgctaataaaagactttatctttgaaagccactgtctgtaaagtttggaagaggtaattatcctatcaacacaaagacacaaaaacatgaaaaagcaaggaaatatgacaccaccaaaggaaagtaagaactctctaatggtggcccaatgaaaagaagatcaacaaattgctggaaaaggaattcaaactaatgatcttaaggaaactcaacaagatacaagaaaatacagatagttcaatgaatcaggaaaacaattcacaatacaaaaaattcaacaaaaaaattaaaacatgatgaaaaacaaccaaacaaatcctacagttgaagaattcaatgaattacatttaaaaaatacaataaagagcttcaataacagacttggtaaagcagaagaaagaatctctgaacttgaagatataccatttgatattacttaattgtagaaaaaacaagtgaaaccctacaagacttatgggacatcattaaaggaacaaacgttcatactatgtaagttacagaaagaggagaaaaggtaagaggcatatacaaactatttaatgaaataatagctgaaaacttcccaagtctggagagagatacagacatccagatccagaaagctcaatgattcccaaatagatttaacccaaaaaggttctctccaaagcacattattatctgttgtcaaaagtcaaagacagagaaagaattctaaaaatagcaagagaaaggcatcaagtcacatttaagaaaatccccattcagctaacagcagatttcttcacagaaaccttacagtgcagaagaggatgggatgatatactcaaacagccaagaatgctatgcccagcaaaactatccttcaggaatgagggagaaatacagtttttcccagacaagcaaaaactgagggaattcatcactgctagaccagccttatgagaaatgctccagggagtcctacatctggaagtgaaaagagagcagtcagtatcttgaaaacatggaaaagtataaaactctctgatagagcagatacacaaaggagaaagagaaaagaattaaaccttatcaaaccatcaaaccacaatgataaataataagagaggaagaaaggggcaaaggatattattagaaaactttaacaaaatgacaaatgtaagggctcaaatatcaataataatcttaaatgtaaatggattaaattccatacttaaagagactggcggaatatttttttttttctttttttttttttttgagacggagtctcgctctgttgcccaggctggagtgcagtggcgcgatctcggctcactgcaagctccgcctcccgggttcacgccattctcctgcctcagcctcctgagtagctgggactacaggcgcccgctaccacgcccggctaattttttgtatttttagtagagacggggtttcaccgtgttagccaggatggtctcgatctcctgacctcgtgatccacccgcctcggcctcccaaagtgcggaatattttttaaatgactcaattatatgctttctataagaaacccacttcacctataaagacacatataaactgaaattgaagggatggaaaaagttattccaagcaaatggaaaccaaaagctgtcaggaattgctatacttatgtcagattaaacagacattaagtcaaaaactgtaaaaacagacaaagaaggttattatataatgataaagggaccaattcagcaagaggatataacaattctaaacatacatgtacccaacaccagagcacccagatatataaagtaaatattactatacgtaaagggaaagatagactccaatatgatagtagttggggacttcagcaccccactctcagcttcggacagatcagcaaactccaagtacagtgaactcaaagagaccacaccaagaaacagtcaaacttttgaaagccaaagacagagaagtgacttgtcatacacaagggatctttgataacatgatcagcagatttctcacctgatactttggagaccagtgtattcaaagtgctaaaaaaaacaaaaccaaaaaactcaaaaccctgtatatggcaaaattgcccttcaaaagcataaggaaattaagatgttcttagatagacaaaagctaagggagttcattaccgctagaactgccctgcgagaaatgcttaaggaagtcctgaaaggtgaaatgaaagggcactagacagaggggacagtgcagattcaggcaggtgcaatggcttctggggaagacccagccagtggggctattgccagcatccagtcagctgccaccttccctgaccccagtgtcaagtgatgcgcagggtgatccaggtgtgtgaggggcagctggatgtccagactgagggcactggtgccatcagtggctatcctaccactcaattcatgacccaggtggtgatccagggtgatatcaccagttatgatgcagttaacacagaggggaaagctgctgagatacactatactttcccacccctgcagtgggagatggggcagggggtaccacatcagggagtacagctgctgttgttactacccagggctcagaggcactgcttgggcaggtgactcttcctggcactggtcaattatttgtgatgatgtcaccacaaggagtactgcagggaggaagccagcacttgattgcccctaggactcaaccttatttatttggacgtaacaccattgtaagtcaagaagcatctctatctatctatgaacatacaatgtgaaatcaaattgaggccataaaacagttgaacctcatcataagagtgactcatcggtgtcacttctaagaccaagaaaaattctatttttatgcagagaccatttgttttttaattaaaagacaactctatttcaaagaggaaaaaaaatcaactcttttttcagctctctcagatgcagaaatgtaattatcagcatccctgtgctgggagcaatcattagtttttttagatttttaaaatatacttcattatgtttcactgtattcattctttaatcagggatgtgagggatagaataacatttagaatatctgtacagtttgtatataatgttcttatttcttgttgcttttataggtggaaaaaatctaaaatctcctcaaaaagtagaggtcgacatcatagatgacaactttatcctgaggtggaacaggagcgatgagtctgtcgggaatgtgactttttcattcgattatcaaaagtatgtgactctacttactgatttgtcagaatgacctgaataatttttacaagtttaacaacaccataatttttagatttggaaagtgtttggtttttctattttttagaaatgttacgcctattttacataatatttttaactttgtttctgtagagacttagtcaaatacatctttgggtgttgaagcaaaaaattggggatgagggtggtagacagcgtctctaacccatagccattccttctttcttctgggtgttccagcttcttttttttttttttttaattattatactttaagttttagggtacatgtgcacaatgtgcaggttagttacgtatgtatacatgtgccatgctggtgcgctgcacccactaactcgtcatctagcattaggtatatctcccaatgctatccctcccccctccccccatcccacaacaggccccagagtgtgatgttccccttcctgtgtccatgtgttctcattgttcagttcccacctatgagtgagaatatgcggtgtttggttttttgttcttgcgatagtttactgagaatgatgatttccaatttcatccatgtccctacaaaggacatgaactcatcattttttatggctgcatagtattccatggtgtatatgtgccacattttcttaatccagtctatcattgttggacatttgggttggttccaagtctttgctattgtgaataatgccgcaataaacatacgtgtgcatgtgtctttatagcagcatgatttatagtcctttgggtatatacccagtaatgggatggctgggtcaaatggtatttctagttctagatccctgaggaatcgccacactgacttccacaatggttgaactagtttacagtcccaccaacagtgtaaaagtgttcctatttctccacatcctctccagctccagcttctttcaatataagttggggtctgagctagggtatatcttgaagatatggcattgtactccaaaaggtccatcgaagaccttggaataggccaccaggtttcctgtgatcaggctttcctattatctccatgatatactatattttaattttaggtacactttttttttttttttttttttgaggtggagtcttgctgtgttaaccaggctggagtgcagtggcacaatcttggctcactgcaacctccacttcccggtttcaagcgattctcctgccttagcctctcgagtagctgggattgcaagcacatgccaccatgtttgactaatttttttatttttagtagagatggggtttcgccatgttggccaggctgatctcaaacttcttacctcaggtggtctgctcacctcagcctcccaaagtgctaggattacaggcgtgagccactgccctggcctagatacactttgtaaatatattgttaactgggcatggtggcatgtgtctgtaatcccacctacttgggaagctgaggcagaagaatcgcttgaacccaggagacagaggttgctgtgagccaagtttgcaccactgtactccagcctgggagacagcaagactccatctcaaaaataaataaataaataaaataaaataaaaatcgatatattggaccttgcatttctaaagactcagtttttctggagtgttgatgtctcttccttagtactttctacttaattattcaagaggagaggcaggcagaaggaggaatatagaagggaacacagatcaggaagtacagtactttgccttccgattatgtgttggggccccacctgccaaccatgttcccctgtccaagaaaaagcaggcaatgaagaaataaggcattaggccctccggaaccaggagcccaccacttcagccacagctgtgacactattctcgagttgtaactaaaactggcatatgaatctcacagcttcagtaattgtgtatgcatatataaacaaatacacactgtatatatgcatatatacactatatatatacatactgtatatatacattacactatatataatacatactgtatacatacatatacacacattgtgtatacatacatatacacacattgtgtatacatacatatacacactatatatacatatacacactgtatatgtatatgtatatacacacacaaattcatatatgacttttctcagaattgatcatttaaaattttttatctctagagattttcattaaattgaactttgagtttggttaccagttttgttttttcccttagtttggaatttccttatgaacaactattttaggtagagaaggaattatttcagatacccttatttaatgttacttgtataaagaaactatttgcaaaatatgcatccaacaagagcttaatatccaaggaactcaaacaatcaacaacaaaacccaaatccatcaaaaggtaggcaaaagataggaatagatatttttcaaaagaaaacatacagtggccaacaagtatgtgaaaaaatggtcaacatcactctaatcatcagagaaatgcaaacgaaacctgccatgagatattgtctccccgcagtcagaatggctgttattaaaaagttaaaaaaggctgggcatggtggctcacacctgtaatcccagcactttgggaggccaaggcaggtggatcacctgaagtcaggagttcgagaccagcctgaccaacatggtgaaaccccatctctactaaaaatacaaaaacttcagccggatgtggtggtgcgtgctgtaatcccacctacttgggaggctgaggcaggagaatcgcttgaacccaggaggcacaggttgcagtgagctgaaatcgtgcccctgcactccagcctgggtgacagcaagacttcatctcaaaaaaaaaaaaaaacccaacaaatattgaatatatttcatgccaaacactcttctgactgcttagactgcctcagtgaacaggagaggcaaagatggcatgaagttatattatgaaacggatttcatgaagtaaatattacattagttacatattcatatttcatattctgttctgagctaattattgcatatgataatagtttttttgttgttggttttttttttttgagacggagtcttgctctgttgcccaggctggagtgcaatggcgcaatctcggctcaccgcaacctccgcctcccgggttcaagcaattctcctgtctcagcctcccgagtgcctgggattacaggcatgcacccccacgcccggctaattttgtatttttagtagagacaggatttctccatgttgatcgggctgatctcgaactcctgatctcaagtgatccacccccctcggcctcccaaagtgctgggattacaggtgtgagccaccgagcccggccaataatgatttttttaagaaaatataaaagtagcttctgctgcaatatcttgattagatgtaaaacagttttaatggagcatgcttcagcatctcctgaagtaggaaagacagatgtaaacagtgaggttgggttgaaattatattaagttttaaatttttgataaggttttctgtttataatgagagtttctggatttttagaaatagattctgatgtggaaccttttcaagaatgtttaaggtatttttaatgccagctctaatctcaggcctcagatatgtaaaagtggaagtgaaaactggccaagaatgaagtatttcatatgctagtgtatatttttggtaatttcttaaaaatgtttccattttgaaaaacaaggtagacttgtatttggttcagcaacaaaattattttggtattatctctggtttctaatatctaaatcgtctttaaaatggcatctgtgatattattaaaaataaataaatcagctaatgaattaggcttgacaaaaatgccttcccagaagatagtttctctgctacttatggtcaatgggcttaacataggtaaaagttctcaaatctgctaaattggccgggcatggtggctcacgcctgtaatcccagcactttgggaggctgaggtgggcagatcacctgaggtgaggagtttaagatcagtctagccaacatggcaaaaccccatctctactaaaaaaaaaaatacaaaaattagccagacgtggtggcacacgcctgtaatcacagctagttgagaggctgaggcaggagaattgcttgaacctaggaagtggaggttgcagtgggccgagattgcaccactgcactccagcctgggcaacagagtaagactctgtctcaaaaaaaaaaaaaaaaaaaaaaagaaatctgctaagttcgtttctatccctcactttccctgcaagctcttcttcccctttctgggcaacatgtccttttctgctttaggcactccatgcccactttatttttcatgtttgccccttttttgaaaggaagaatctaatatcacttcagctttctgattggccagttccacttccaaaaatttatttgtttatgtaaacattttcagttttgtggtttctgatgatgtaatagaagaaattacggagacaggcaagcagaagggatggtttgcttttggagagggcagaggaaaccttgaaaccatactgattctgaggtctttcttagggaaggtaagtctattcataggaggaggtcagaagggaatcatcaaatccaattccccagtttctatttaattttattttattagagacagggtcttgctcggttgctgaggctggagtgcagtgatatgatcatagcctactgcagcctgcagccttgaacccctatgctcaaatgaccctctcacctcagcctacccagtagctaggactgtgggcatgtgccaccatgccctgctttgcctttttttttttttatttctcatagagacagggtttgctatgttgaccaggctccaaactttcaataaggaagataagatccagaaacacaaaatagtttaccaaaagtcacacagctatttttaacagagccaacatactaaatccacttttaccttatgggtcatttatttctctgcttcctgaagcaaccacccacaaaattatataaagaactgtattttaaaattcagtttcataagtaataacttggcttatatgcattgaaaaagagtggaagggtgtatgctaaaatgttaataggacattagctcaagtagaagaaataactcttaaaccaaaaatagaaataactcttaaacaagagttattaagagttaagaaataactcttataccagtaaatagaaagtatttgacacttacatttatacatttgctcactcattcatttgttttttttactttaaagaactgggatggataattggataaaattgtctgggtgtcagaatattactagtaccaaatgcaacttttcttcactcaagctgaatgtttatgaagaaattaaattgcgtataagagcagaaaaagaaaacacttcttcatggtatgaggttgactcatttacaccatttcgcaaaggtaagaaaaagttgctagctgaattatattctttagtaaatattaccagagcagttcactttccaagccattcatttgcatgatgcaaaatctaacatcttttaaaaagaacaaaaattcccttaaacctatatcttcttcctgctatggctccatttgtcctactttccctgtagtagtggttctcaaagagtgatcctcaaggccctttcagggggctgtaaagacaaagctatatttatgacaaatctaagacttagttgcctttttaatttttgttctttcttgtattcacagtggagttttccagaggaggctgtttgatgtgtgatgtggtgatatggtcactgatttaacatagaattcaatgtgaaattcatctgccttctttattaatccaaacattcaaaagatttggaaaaaaaatgtaaaacagcaccactctgaagtttctatgttccttttggcaaatgtttgttaccataaaataggtttatcattgttatttctttctttttttttttgagacagagttttgttcttgttgcccaggctggagtgcaatggcacaatcacggctcactacagcctctgcctcctgggttcaagtgactctcccgcctcagcctcccgagtacctgggattaccagcatgcatcaccatgcctggccaattttgtatttttagtagagacagggtttctccatgttggtcaggctgacctcaaactcccaacctcaggtgatctgcccacctcaacctcccaaagtgctgggattacaggcgtgagccaccatgcccagtccattgttatttcttaatggattaattagttaaaatggattgaaaactttaccagttttaatgtttaatatgctaatataaaaatatacagcccacataaataatggctgtttgggattctcgataattcctttaagaatgtaaaggagctgagtgtagtggcccacacctgtaattccaacactttgggaggctgaggtgggaggatcacttgaggccagaagttcaagaccaacctaggcaacatagtgagaccccatctctacaaaaaatatataaaaattagccaggcatggtggtgcacacctgtagtcccagctattcaggaagctgaagagggaggatcacttgagcctgggagatcaaggttgcagtgagctgtgtttgtgccactgcactccagcctgagcaacagagctagaccatatctcaaaaaaaagtggggatcctgagaccaaaaggtttgagaaccactgccctgtaccaagaatgatctgtactccctttctatactaatcttccaattccctgtcagccctctccattcaaattctgttcctcctcacttaaaaccactctttttggccaggcgcggtggctcacgcctgtaatcccagcactttgggaggccaaggcgggcagatcacgaggtcaggagatcgagaccatcctggctaacacggtgaaaccctgtctctactaaaaatacaaaaaaaaaaaaaaaaaaactagccgggcatggtggcgggagcctgtagtcccagctactcgggaggctgaggcaggagaatgacatgaacccgggaggcggagcttgcagtgagccgagatcgtgccactgcactccagcctgggcgacagagcgagactccgtctcaaaaaaaaaaaataaataaaccactcttctcaaggtcacagcagcctccacaatgccaagcaaattcccagtcctcttctggcttcatccctctgtagcatagatgtggtcatcactcagtttttcctttactggatctctgggacactgctctttcctggttctcctcctgctcattgatcgcttcatcttcccaacttttcagtgttagactgctgctgggctcagtcattgaacctcttctctttctgtatcactccactggtgatcttacagctttctatcctatctgtatgctcttaactcccagaagtggcaggcacatattaagtgctcagaattatttgttgaatgaaggttttggcattgtattaataaagttccatagtaattgttttgatttttttgcagctcagattggtcctccagaagtacatttagaagctgaagataaggcaatagtgatacacatctctcctggaacaaaagatagtgttatgtgggctttggatggtttaagctttacatatagcttagttatctggaaaaactcttcaggtgtagaagtaagcattatttttacctctgtttaatcgatgtgagagaaaaattaggcgaattaatcctaaaatttgactttatacttttttaaagaaccaacttatatttgtgttataggaaaggattgaaaatatttattccagacataaaatttataaactctcaccagagactacttattgtctaaaagttaaagcagcactacttacgtcatggaaaattggtgtctatagtccagtacattgtataaagaccacaggtaaggaagatgttttgttttagattcaataaatatataaacagattgtcaattttggcatcttccccatattgctgaagtttacatgataggtcaatatatgttaaaaacattgtaacatttacataagcaaaataaatgttacttgggatttttgtctcaaatagtaatgaaaattaattctacttaaaagttcaggctgggcgtagtggcccacgcctgtaatcccagcactttgagaggctgaggtagctggatcacttgaagccagaagttcgagaacagcctcgccaacatgggaaaaccccgtgtctactaaaaataattagctgggcgtggtggctcacgcctgtagtggtagctacttgggaggctgaggcacaagaatcccttgaacctgggaggtggaagttgcagtgagccaagatcgcgccactgcactccagtcgggagcaagggggacaaagagtaaggctccgtcttagaaaaaaaaaaaagttcaaatattttgtaatgacaaaacttttcatttgttcagaatccacatgaagcaggaggtagctgaactatgagttctgcaagtgggaagaaaaggtggggaagtagttgctagtagacaagttattgttcaagaaagcatacctttgtaagtggaatgttaaaatatgaaagtatcctgatacatttagtaacatctttccaataattaaggtcaagggcaggagctgggatttgtttattttaattgtaaatttcatatgcttttttttttaatcaaacattacggaagggtttaaagtgaagtcttcttctcccttcttatccccaattccattcactagagataagcattgcttagcagtttgtgtatatcctttcacaacttttttcaggatttatgtaagcatatacacagacccacagtttcttgggttttgttttttaaaattacaaaataaaatcttactagaagtattttacagcttgcttacttaacccagtgtgttggggatattctatatcactcaatacagatctattacgttcttcatttgatcttagccatctattgcattctttcttttttacttatttatttatttatttatttatttatttatttatttttgagacagagtctcactctcttgcccagaatggagtgcagtggctcaatctcggctcaccgcaacctctgcctcccagcttcaagcgattctcctgcctcagcctcccgagtagctgggattacaggcgtgtgccatcatgcctggctaatttttgtatttttagtagaaatggggtttcaccatgttggccaggcgcgtctcgaactcctgacctcaggtgatccatccacctcagcctcccaaagttctgggattacaggtgtgagccactgcgcccggcctgtagtctttcaaatggctgcatagtattacatagtgtgaatacaaaccatatttaactattaccttataatgataaaatgcgagcctttatcttcttgccagttatctcacttgagtaaaaatgtgtgcttttttttatctgttctttggcttctagttgaaaatgaactacctccaccagaaaatatagaagtcagtgtccaaaatcagaactatgttcttaaatgggattatacatatgcaaacatgacctttcaagttcagtggctccagtaagttccattccataaatttccttttgcccagtttgttttgattatgcttcttttcgctctgcatcagtcaccaggtccttgcacacagaatgaccgactgggaggtgggtacgatatattggaaacgtgagaaatctcatttctaaccccagttctgccagtaactaactggatgacattgagctaatcgcttaacctccatgggcctcaatttcttcacttgtaaaatagatggattctaatatctggggttcttactggcttaagaaaaaaaagaaagtgtaactagttgcatgtgttatttccccaatctggaagactcgacagttgaccctgatctttttctaagaactcacttcttccatgagtccttaaaatgatctcagtccactcacttgttcaattcaaaaaattagccttcctattttctttattactttagtggttttgacaaaattttgtagtagatacttcggtgggaaagaaagttggaaagaactatgttctatgtggttgagcagaggctagctaaacatggatgaagtccaggcgctgcataaatgaaagagaactggcctggtgcagtggcgcatgcctatcgtcccagctactcagtgggctgaggcaggaggattacttgaggccaggaattgaggctgcagtgttgtatgatcacacctgctagtagccgctgcactgcagcctgggcaacatagtgagacccccatctctaagcattaaaatttttaaaaagctgataaaagagaactgcatgtagtttatattgattggaaaattgtaggagatgaatagagaaaagagaagaggaaaattaagtagaaggaaaaatgggttatggggagaaaagagatggaaagaaagatatacattggtggcagaggagtagagagagcaaaggcaagtatagctaagacaggaaaggaaaagtcagaagaaactggaaagaaacagaaaaaatgagggagaagggaagtgtaagtaccgctatgatcaatttctatcttttagtgttaattttgaaccaagggtgactggtagaatgcaaatgcatttatgtgcatatgtgccccacaatgcatatataacctcacaaaccaatcaggaaactgttcagtagtcttttgtgtatacctcactttcagaagtgaataaataatagggtcaccaaatagataatgagaggtatttctgatagctgatctctaagcttcttttgggtacttaccatattgtacaaagcactgaagaaatggaaagagtcagcagaatcaaacgtggttcaaaaattgaaagcagttagccaacattgcaaagtgttgtgtggtttaggactaaagagtggtatacaaattataagggttgcagaaattgaaaatgtaaaggtgaataggggctaaagagaccaaagaagccataaggaaagagataaggtatgaacaaggccttgattgttaattcagattttttttaagtagacaactattagatgttagttttctgtgtctgtaactaattaccacagacttagcaacttaaacagctgtttattgtctcaaagtttctgtgagtcaggagtccaagcgtggcttagctggctcttctgctaagcagtcaaggagtcagtcattcatacaagacttgggggccgctcccaagctcacatgttgttggcagaatttatttctagagctcatggtggctcacttcttagaggccatcaggaagggagagtctgacctctagatccttttttttttttttttgagacggagtctcactctgtcacccagactggagtgcagtgacatgatctcagctcactgcaacctccgcgtcctgggttcaagtgattcttctgcctcagcctcccaagtagctgggactacaggtgtgcaccaccacacccagctaatttttgtagttttagtagaaacggggtttcaccgtattggccaggctggtctcgaactcctgacttcaggtgatccacccgcctcagcctcccaaagttctgggattataggcgtgaggcaccgcgctcagccattttttttgtatttttagtagagacggagtttctccatgtttgccaggctgttcgcaaactcctggccccaagtgatctgcccacctcagcctcccaaagtgctgggattagaggcatgagccaccatgcctggcctagatcctcttttaaggggttcatctgattaggtcaggcccacccagaatagtctctcatttgattcaactgatttgggaccttaattacatctgtgaaataccttctcttctgccacttaatgtaacctaattatgagaggagggcctccatcgtatttacaggtcctgcccatgctcaagaggaggggattatacaggatgtgtacaccagggggcaggaatcttgggggccatctcagaattttgccttctccagtggggaggatgtccttctagagtagcagaacatttggacaccaggtggcaatgggaagaaagctgaataagtagaatgggacaagattagggtcaacctcaggctgtcctgtaggcttttggggattttgtgttggggtgatagttaacctgagctctggatttgaggaaggtgcatgcggcgacatggtatgtgggagagtggactaaggagacactaaagagagataaggaaaccagtcaggaggctattagagttctgggcttgaactgagatgcttttagctgttggtttctgggcaagttacttaacctctttagtctcgtacttatacttgctcttataaccccgcagtgtgtctctattttagcacttaatcagtgtccattggtatgctggcgcatgtttagcagctggctttccagaaagaaaaagtcctattttgtagtgtttgctgatttttatgatataaatattcccaccatggccactttcaagccaccagcctgatgtccctgaatatggagttgggaacatatgcacagtagcacaccactatcatatagctacaatagataaagatagccccaagagcttagaaaataaaatgtagtaaaataattaggacaagatgaatttatttattacctctgtctttaaaacaattttttatttgcaaatttatataacttaatttttagtaatggtttttctttaaaaaccagtttgtattttaggaggccgaggtaggtggatcacctgaggtcaggagttcaagaccagcctggccaacatgacgaaaccccatctctactaaaaatacaaaaattaggcaggcctggtggcgtgcacctgtaatcccagctactcagggggacagaggcaggagaattgcttgaacccaggaggcagaggttgcagtgagccaagatcctaccactccactccagcctgggtgacagagcgagactcggtctcaaaaaaaaagccaaaaaaaataaaccagcttgcagcattcctggaaattctaactaacagatgttcttgcatattgatatgagccacctccagcagagcacaacatgaccacagtctggaacagtctttggttttcttttatgttagatgcatatctcttccattgtttgtgagtttcctgagtgtggatactatttatttctgtaaccttagcccctaacatagtgtctggcaattgtaaatacttaataaatatctaatgaatttaaaaaatatttgtcttaaaagcgcctttttaaaaaggaatcctggaaaccatttgtataaatggaaacaaatacctgactgtgaaaatgtcaaaactacccagtgtgtctttcctcaaaacgttttccaaaaaggaatttaccttctccgcgtacaagcatctgatggaaataacacatctttttggtctgaagagataaagtttgatactgaaatacaaggtaaggcagtagtttttactggagattgtaattctctggtgcaagtttttaaaattgtttttctaattgaacattatttctttacaaattttttctagctttcctacttcctccagtctttaacattagatcccttagtgattcattccatatctatatcggtgctccaaaacagtctggaaacacgcctgtgatccaggattatccactgatttatgaaattattttttgggaaaacacttcaaatgctgaggtaaaaagactgtatagtataattttgtaacttagagttataattatgatttgggtaaataaagcttgaatgtaaaatttgggggaaatttttaaactttatgtgggctggatgcagtggcctgtaatcccagcacttcaggaggccaaggcgagaggatcacttgagcctaagggtttgagaccagcctgggcaacatagggagaccctgtctcaataaaaattttaaaaaattagcctggtgtggtggcgtgcacctatattcccagctacttggggtgggagggtcacttgaacctgggaggtcaaggctgcagtgagccatgatcgtgccactgcactccagcctgggtgacagagtgactgacagcttgtctttaaaaaaaaaaaatgtgattaactcagatattaacaaaatgaagattatgagcatttttcatgttttgcactgtagagttatgggtgagctgcatctgggccccagtttgcttttaaaatacagattcctgagcctattgttactgaatcattatctctggggatggaactcaggaatttgcatttttaacatgattcccatgtattcatctaaacctgggattctcagcactattgacgtttgggctggatagttccttgggagggggctgtccagtgcagtgcaggatgcttggcaacattctggtttctgcctactagatgccagtagtgttccttcctagttgtgacaaccaaaaacatcttcagatattgtcaaatgtcccctggtggctcctccaaggggacaaaaattggttcttatgggacaaaagaatttatgtagtacagttgtttgttttcctccaaaaccattggaaagcattcttccaaagttcagctttgcccaacaaaatcttattccttagtatttaattttatgatgggggaaggattaggaaaaaattgcccaaaaagttgtttagttggggaggtaatgaaaaaagggttgacaaacactggtctaaaccctaaaattcagataccactgacaaagataatatataccgtcagataatatacgtgtttcccagatcacttccccctcgtggacttgtagtcaagaatcgacctttaaaactcctgtccagtcaggctggtaaattctttaacttcacctcattttctattggaaatctaagcaaattccattgatttggctgcttccctttttaattgtctgacaaccctgtaaccatagcttaatgtagcccattgagaattatggtcggttttcagatgtctgtagatcagacaaacctaaatttctatctcactgctaaactgtgtaaccttacgtacgcagggtgctttacctcttggagactttgcttcctcttctctgaagtggtggtaatcataacaactaaatttttcaaaaggatgtttataaggtttaaaaggaagtaacaaatatgaaaatacctagcacattgctggacaagtagtagagattcaataaattgtagttgccatcttaacctatactggataatatatcaataattgttactatagaaactcttattgaatacttatatgtaaggtactatgctaagtattgtacatgaattgtctcagtcattcttcaaaacaaccctgccggattatgtgattggttacattgctgtttggcaaatacttgggacggtgacttcttccctgcaccaccagaccgtagatgctggagcccaagtagatgtgctgagaacagaggccttaagtgtgcttgcagggtttggcttggctcttgcactgctcctatttgccaggaataaaatgtattccacatagtctctggtccaaggaggattagaggctgctggagctgacctaaaccccatgcacagcctccgtgggagctgcccagccagtctgtagacttgtgagtgagaaactacataatcgttttgtgagccactgaacgttaaggcagttttgttatctatatttttttattttattttattttattttttttttttttgagacaggttctcattctttttcccaggctggagtgcactcatgtgatgtcagctcactgcagcctcgacttcctgggcttaagtgatcctcccacctcagcttcccaagtagctgggactacaggcacatgccaccatgcctagctaattttttgtatttttgctaaagatggagtttcaccacgttgcccaggcttttttggtggtggtggtggtggttgttttggaaatagggatttcctcagcctcccaagtaacagagactacaggctcacaccaccatgcctggccaatttttttgaaatttcttgtacagacagagtctagctatgttgcccaggctcgtcttgaactcctgggctccagtgatcctcctgcttggcctcccaaagtgctgggattacaggtgtgacccaccggcttgttagacattattctggcgatagctgactgatacagatagcagcaataactgtcccgattttatagatcagggaatcaggtagagagaaattaaataatgcttgcaagaccacacagctgtaagtgatactcttaataaggcagtttgaggccaaaacccctactcttaaccattctgtcactaatcagaggtaatacaatggcaattaccccagacttggcatgtacttgtaaatcaattagaattctcttaggaatagatcatatgcttttttggcagcagcatttttaactttctgatttggttatagtggtgtatctaaaacaaatttatatttctcacacatatactctgtaatcccagcactttgggaggccaaggtgggtggatcacttgaggccaggagttcaagaccagcctgaacaacatggtgaaaccccatctctaccaaaaagaaaaaaaaattaggcgtggtggcatctgcatctgtaatcccaactactcaggagggtgaggcaggagaatcgcttgaacccaggaggcagagattgcagtgagcccagattgcaccactgcactctagcctgggtgacagagcgagactgtctcacaaaaaaaacaaaacaaaacaaaacaaaacaaaaaatacataccaactacgtgggagaggccaatgttagactgaacataaaaaattgagaaagcacatattccctgatttcttgaggtgactaaattttatcagtgatttaattatattttctagagaaaaattatcgagaaaaaaactgatgttacagttcctaatttgaaaccactgactgtatattgtgtgaaagccagagcacacaccatggatgaaaagctgaataaaagcagtgtttttagtgacgctgtatgtgagaaaacaaaaccaggtcagaatcttttattgtcttttttaaaaatgtagctagacataataaaagtaattctatactgtacattgaaaattgtaaaacattttctctttactgcaaaaaatatatagaaagaatgttttcttcatgaactacatgaatcaaaagtagactttttagaaaatatttgtaacgcttaactctcaagtcggtgttgttggatgctttatatttcatccagtatccctataattaatttccttaatgtatttctctttaacatttaataaaactattttaaatttttagaatataatccttaacataattatcatgtagaaatcacttagttcaattgtgagttttttaatgtgggaattggtttagtctcattttctattttacagtttctagtgttgaccggtagaggcttagtcacagaatatctattaaattttgctagttgtatggtgtaaaagtgctgaaggatacttgcatgtttggcctgtatgtcaatattgtatttctccctgaggatctcttacttcagttcccacgccaatctttaaatgtaaatgtcattgcctatggttgctgtggactcagtgctgccagaaatatttttaagagtattatttaatagattttatatttcctttcatatggctagtctttcacacagctgtcagcactgttaaggcatttgtatgtcaaaatatatgctaaatatcacgtatatctttttaggaaatacctctaaaatttggcttatagttggaatttgtattgcattatttgctctcccgtttgtcatttatgctgcgaaagtcttcttgagatgcatcaattatgtcttctttccatcacttaaaccttcttccagtatagatgaggtatgttactttttttatttttttgtcaacagctaggtaatgaacagaaaatgtgtttgatttcaacaggatatatgtaggttttcttgatatccagaaaataatagagactgatttgggtatcttcttcaaagctttagtcaattaactttaaaaacagtaatttcatgtaataacatagcatgagatagtaatgattgtccttaatttcatatttttctggcaattcctagattcactgtggcatttgttttaccgtttaaagcctgtgattcttggccaagcgtggtggctcacgcctgtaatcccagcactttgggaggctgaggcgggtgggtcacttgaggtcaggagttcgagaccagcctggtcaacatggagaaaccctgtctctactaaaaatataaaattagccgggcgtggtggcacatgcctgtaatcccagctactcgggaggctgaggcagggggatcgcttgaacctgggaggtggaggttgcagtgagccgaggtcatgccactgcactccagcctgggtgacagagcaagactctgtctctaaataagtaaataaagtctgtaatgtgattcttctcagtacagacagtcccaaacttacgctgtttcaatttgtgatgcgtttgtcagaacgtaattccattgtaagttaggagcatctgtatatatccagaagactaaaatattctatcagcgtagaaagtatattctatggatgaaatcatacaaaatgaaataactaaaaacatgagactttttttatgacacacatcacagttttttgtttggcacttctatgaagctagcatattaaatgaaagcactgaatggtgaaggcctaaacatagaatctgttcctgggaaaccatgtgctcatctagggtgggttttgtgaatttgagcaagtcactaagggcaggtaagcaagtacccttggctgtaaaccaccccatagaggtgttaggagcaaaggagttaaaccataagaaccttaccactctaaaaatgctccgtaaatattaacaattttactattatacccctgagtttttaaatgtcattcctgtgtactgtaatattcatagctattatttaaaatagacttaaaaactagttacaatagccaataatttctcaattgtgcttcttctggatatatatgtgttggatacaaacatttttattatttcaaaaaaaaaaagtcatgatcccagagtccgcccgctcctgtcctttcccgtgttcttccccgcctaccccgatggcacagtgtacctttcttaggtactcttcaaagactcaccacagaaggtactaagatatgagtgacctcactaatgatgcttttaaacattataaggcaattagtatgttcttaggcgactttttaatatgcatgccagaagataggttttctcagtaatggatgtaagaaactaaagctattacaactagaaaaggaatttttattattttaaataattgatttctactctttccctttttttaaattagtatttctctgaacagccattgaagaatcttctgctttcaacttctgaggaacaaatcgaaaaatgtttcataattgaaaatataagcacaattgctacagtagaagaaactaatcaaactgatgaagatcataaaaaatacagttcccaaactagccaagattcaggaaattattctaatgaagatgaaagcgaaagtaaaacaagtgaagaactacagcaggactttgtatgaccagaaatgaactgtgtcaagtataaggtttttcagcaggagttacactgggagcctgaggtcctcaccttcctctcagtaactacagagaggacgtttccctgtttagggaaagaaaaaacatcttcagatcataggtcctaaaaatacgggcaagctcttaactatttaaaaatgaaattacaggcccgggcacggtggctcacacctgtaatcccagcactttgggaggctgaggcaggcagatcatgaggtcaagagatcgagaccagcctggccaacgtggtgaaaccccatctctactaaaaatacaaaaattagccgggtgtggtggcgcgcgcctgttgtcttagctactcaggaggctgaggcaggagaatcgcttgaaaacaggaggtggaggttgcagtgagccgagatcacgccactgcactccagcctggtgacagcgtgagactctttaaaaaaagaaattaaaagagttgagacaaacgtttcctacattcttttccatgtgtaaaatcatgaaaaagcctgtcaccggacttgcattggatgagatgagtcagaccaaaacagtggccacccgtcttcctcctgtgagcctaagtgcagccgtgctagctgcgcaccgtggctaaggatgacgtctgtgttcctgtccatcactgatgctgctggctactgcatgtgccacacctgtctgttcgccattcctaacattctgtttcattcttcctcgggagatatttcaaacatttggtcttttcttttaacactgagggtaggcccttaggaaatttatttaggaaagtctgaacacgttatcacttggttttctggaaagtagcttaccctagaaaacagctgcaaatgccagaaagatgatccctaaaaatgttgagggacttctgttcattcatcccgagaacattggcttccacatcacagtatctacccttacatggtttaggattaaagccaggcaatcttttactatgcattaagacctctgattcaaaacttattagaacagtagcttctgctggaatttgcaatcactgaagtcatagaaaataggtaactatctaattagagaaataattgttgtattttaagatctgagagtgtgtacaagttttagtatacatgccatgccagaagatagtgtatgcaagaagtcttgggaccagaaaatggcaatgataggagactgacatagaagaagaatgcttccctaggaaaaaggtcgctggctttggtgcaagaggaagaagaatgttccactggaagcctgagcacctaatcagctctcagtgatcaacccactcttgttatgggtggtctctgtcactttgaatgccaggctggcttctcgtctagcagtattcagataccccttctgctcagcctgcttggcgttaaaatacaaatcattgaactgagggggaaaaatgtaactaggaagaaaaacccaatttaagaaattacataatgctttccaaaggcacctacaacttagttttaaattacttgctactggggattacccatggatatccttaataggcaggaagtctgggaattctggtggcctctagggcagtgttctcacagcaccgttccgacagggaccagtgaaagaaaagagacaaagttagaacgtgctggggagcggccatttctaaggccagtctggtttaagtagtcatttctgctgaaaaaacagatgatcctggtggaagaaaaggttgaaggcagctgccctcgggagggctgtgatgctcggcacatcctgcctggcacatacacgtgtctgcaggccacaccgtgcatgtccccagacctgccgcctggcttctggagtgcttcaagcagagcatggtgggtcattgaggagacccaggaatctcatctgagaacccactctctgccggagaaccccatggtgacacattttcatctttctgaccagaggctgtttttttttttttttgagacagtctcattctgttgcccaggctggagtgcagtggcttgatctcggctcactgcaacctcgcctcccgggttcaagcaattctctgccgcagcctccagagtagctgggataacaggtgcccaccaccacaccccactaatttttgtatttgtatttttagtagagatggggtttcaccatgttggtcaggctggtcttggactcctgacctcatgctccacccgcttcggcctcccaaagttctgggattacaggtgtgagccaccgtgcacggccggcctgacctttggaaaagccttgtcactttggacgtttgcgtctttgaagaggcgatgggagcatatcatgactgcctgccaccattgcttttcagactaccacaactcaatcatgctgtccaggacttctggccctgtgttcaccactgggaaaacgtacttcagactggatagcctaaaaaggagcaatgcccttgtaggatgtggagaagggaaaatacggacattaacattaaaagacaccagtgaaattgttaggtctctaggaagttggagcacaaggcttcacgctttaagaccatctgtggttttcagtgaacaagcgctgagcaccagcagcagaaaacaacaacaaaaaaacacctcgtttttaccttgtcttctagacatgaaaaggcagttgcattccactctgcattatgttctacatgttgctttatcagtatatgcttagctgtaagtgacaagtattttttctgaacagaagtttacttagaaataccatgcacttgggggtaccaattaaccgcctgaaaattagcatattgatagttcttagagagaccagatataatctaagaatttatatgaaagatttgtatcattagagccagaaataattttatattaatatataatacagattaacattatatataatatgtacctgtgtcacttctgacatgagcctgtaaacatatattcatatatgtacctgcacatgtacccacctgatgtaggtcttattcctttagtatggacttaaagtacttattcatataccttgtaactaaaaattagaacagctccctagaattgtgaacttttaagagtctgactagaaatttgcaacttataaaaaagttacttttaaaaatataagttagggctaggcacagtggctcatgcctataatctcagcacttttgggaggccaagacaggaggatcacttcaggccaggagttcaagatcaaccaacctgggtaacatggccagaccccatctctatttatatatatatatataaaacttagagtttttatcttcccctaaaagaggccgtgatatttgcagcagcctcaaattgctcttaaggggtttaggtgtgcagaagctttcctttccctacccagtaaccatgtgactactaacgtggtatattgatttattttgtttgctgtctgtctcccctgccccactgctggaacagaggctccaagaaaacagggaccttattattcattactgcatccccagtaatgaaagtacttagaaaataattattgaatgaatgaaatctaaactgtgaacctgagggtgtttgtggcagtgtttgttttactgaattgtagaaggacataaccgtgttttcagtgtttctatggaacaaacttgtacattttatttcacttgtgttttgtcttaaaccctactgctggaaacaattttatgtaataagcaatgggcccaaaagtctaggagtttttttgtacttagtgaatttgtatgcaacagagatgctgcagctgatgcctttaaaaggtattcatcatggaagagctgaggcctgtgcttggtgttccagagcccagggttgagcatcctgaaggagccactgcagccgtcactgtccccagagcctgtggagatagagcctgtttgctgctttttcttcccgctcttaagacatggctggagctcagtcttcattgaatgaagtttgctgtggtattgcatagccttgctttcttgaactaaactgtttgcccttcacaagtagttcttctttcaggattagttcgttccaaggaggctcttcagtctcacagataagtagatctctcctgctgtctggacacatttcactcggaaattgaatacaatttgtattcaggctgggaacctgaacacacacttgtgtttttaagcttcccttttttacagtggacaaggacacaaataataaataaatcatccctaatgcccaagaaatgccctggtacttagtaataacaaaataccagtaacttccagttgtttctcactaccttttttcttgagtaggatgataatagaattacaactcttgagggcaacataaatataggtggatatttgtggtatgatattgatggaaaaatagcaatctttttctttacctgaggggaacaaaggcaagaggagaattcgatagttctcataacaaaggatttctgagttttcctcccctttctgtgatctgtctccacttggaactcatgttctagcaaaggacattttgtgggtgaagaagtgattaatgattaggatgaagaaaatgttggcagttccagcctggccaacatggtgaaaccccgtctctactaaaaatacaaaaattagccaagcatggtggcatgtgcctgtaatcccagctactggggaggctgaggcaggagaatcgattgaacccgggaggcggaggttacagtgagctaagatcgcaccactgcactccaggctgggcgacagagcgagactccatctcaaaagaaaaaaaatgttggcagagaagatgttctgttgtttttttttttttttaaggtcttgagaaaagggaggaagttgaaaaattttatcactcaatagctggattaaattaaacattacgtctcacagtgactcaccacccttgagcctccctcccagattttctggatacatcaaagttaagaagaaaaacctattttcctatctttccagtaaaaggacccttttttctaaacatagtccttaaatatataataggctttttgtgtacttgactctgttgtctattcccaaattttataatacttttaatattctggaattgtacttagagagattattctaaatgttgtagtataaaagtacatcatccactctgaaatctccctaaaagaactccactgcatacacgtggagaagtcatcatgccccatctgtgtctgtacctgcgggtgtgtctagcatgctccctagggaagggattttataccatttgcttatatttatttggcaagctccatgaaaacaaggactgttttttaactttgtggctgacacttggttgcctaagtgtttaacggtgattgagcggggacgttgacggtacaaacactgattgaatttaccactggagggcaacaagtcaccctgttcaggctgacaatcggttactattcaataattccattcccagaagatacgccaagtatgtttatacaggtggtttcttaaagttctgtttgtgattatctcgtcttgagcaaatgaggaaaggatgtgaagaatctggtgtccccatgatctcacccagaaatggtttggtagttacaaagcaagatagagcagttgagcaaatacttagcccatctagtcctctaccactaccaccttcgccttttaatgagcaggactttgtagtaagcgagttgttgaaaaggagctccacatacttagtaacagcctcggagcggatggaaagaagtaggcattgctgcagagctgagatgaacctgcaaggagacagccttggccccagggaatgatcactgcactgcgccccctactggcctggctgagatgactagctgtgattccctccttagtctcacctgttgaagatggcgcagaacagttacagccatgatcaaaaaagataattaatactttagtgtctcctgccctatccgcccccagggagaggccagaccattcagggtgccagctggaggttataagggtggagtgtggagacagtgtttcgtgtcactacttcctttttttttttttttttttttttttttgagacagagttttgctcttgtcgcccaggctggagtgcggtggggcgatctcggctcactccaactttcacctcccaggttcaagcaattctcctgcctcagcctgctgaatagctgggattacaggcgcctgccaccacgcccaactaatttttctatttttagtagagagcttcctgatagctgaacatgcagaggctgctgggaagggcatagaatctctgcagtccttctcacataccttatcctatgtatctcttcatctgtatcctttgtaatagccttcataataaaccggtaaacataagttagtgtttcctctagttctgttaggcaatctagcaaatcagttgaacacaaggagggggccatgggaccctcaatttatagtcattcagtcataacaggtaaaacctggggcttgcaattggcatcggaaataagggggcagtcttgtgggaatgagctctcaacctgtgagattgaagcagcatggttgtctggggtaatacgtgtggtttgttgccccacgccaaggaaatcgaggatggggacacaaaaggagtgggttcaagagcggaagtttagcaggcaaaagaaagaagagaccttccctgtgcagaggaaggagtcccgaacaggtttccgggtttacagcgagatgcggttgcttttatagatgagcttgaggaagcggtgtcttatttacgtagggcacagaggattggttggaccaggtgttccatttacatagcacaggaagaggctggccatcccaccctcatctgttattatgcaaatggcacctctacctagcccaggccttgttgcctgcttttttactgcacacgtggcaacaaagaaaagggaaaagggaacttcaatattgaatatacctgacttccaagtatccctttcctattggcacagctgctggcattcgcctatgcaagcttccagtttgcttatctatgtttgcagcttgagttttcaggctctttttgttagaaaagaaatgatttggggcttctttttattaaaaggcaaaccttactgaggactcttttatcctcactaactgcctaaataaattttgtttaggtgttgtatcaggatctgatgctatctccaggtagacagtgtcagaattaaataggaggatacccaaccagtgtctgctgcagaattgattgccttcttgttaatggggagaaatcactacgcatttggtcacagaagtcttctgtgtttattgttgtggcatgagagcagaggaaaaacggtttgagatttttcccctcaaaaacataggggaaatcttcatgatattggacttggc

SEQ ID NO: 2 - DNA, 6099 bp, Homo sapiens
aggcggcgcgtgcgtagaggggcggtgagagctaagaggggcagcgcgtgtgcagaggggcggtgtgacttaggacggggcgatggcggctgagaggagctgcgcgtgcgcgaacatgtaactggtgggatctgcggcggctcccagatgatggtcgtcctcctgggcgcgacgaccctagtgctcgtcgccgtggcgccatgggtgttgtccgcagccgcaggtggaaaaaatctaaaatctcctcaaaaagtagaggtcgacatcatagatgacaactttatcctgaggtggaacaggagcgatgagtctgtcgggaatgtgactttttcattcgattatcaaaaaactgggatggataattggataaaattgtctgggtgtcagaatattactagtaccaaatgcaacttttcttcactcaagctgaatgtttatgaagaaattaaattgcgtataagagcagaaaaagaaaacacttcttcatggtatgaggttgactcatttacaccatttcgcaaagctcagattggtcctccagaagtacatttagaagctgaagataaggcaatagtgatacacatctctcctggaacaaaagatagtgttatgtgggctttggatggtttaagctttacatatagcttagttatctggaaaaactcttcaggtgtagaagaaaggattgaaaatatttattccagacataaaatttataaactctcaccagagactacttattgtctaaaagttaaagcagcactacttacgtcatggaaaattggtgtctatagtccagtacattgtataaagaccacagttgaaaatgaactacctccaccagaaaatatagaagtcagtgtccaaaatcagaactatgttcttaaatgggattatacatatgcaaacatgacctttcaagttcagtggctccacgcctttttaaaaaggaatcctggaaaccatttgtataaatggaaacaaatacctgactgtgaaaatgtcaaaactacccagtgtgtctttcctcaaaacgttttccaaaaaggaatttaccttctccgcgtacaagcatctgatggaaataacacatctttttggtctgaagagataaagtttgatactgaaatacaagctttcctacttcctccagtctttaacattagatcccttagtgattcattccatatctatatcggtgctccaaaacagtctggaaacacgcctgtgatccaggattatccactgatttatgaaattattttttgggaaaacacttcaaatgctgagagaaaaattatcgagaaaaaaactgatgttacagttcctaatttgaaaccactgactgtatattgtgtgaaagccagagcacacaccatggatgaaaagctgaataaaagcagtgtttttagtgacgctgtatgtgagaaaacaaaaccaggaaatacctctaaaatttggcttatagttggaatttgtattgcattatttgctctcccgtttgtcatttatgctgcgaaagtcttcttgagatgcatcaattatgtcttctttccatcacttaaaccttcttccagtatagatgagtatttctctgaacagccattgaagaatcttctgctttcaacttctgaggaacaaatcgaaaaatgtttcataattgaaaatataagcacaattgctacagtagaagaaactaatcaaactgatgaagatcataaaaaatacagttcccaaactagccaagattcaggaaattattctaatgaagatgaaagcgaaagtaaaacaagtgaagaactacagcaggactttgtatgaccagaaatgaactgtgtcaagtataaggtttttcagcaggagttacactgggagcctgaggtcctcaccttcctctcagtaactacagagaggacgtttccctgtttagggaaagaaaaaacatcttcagatcataggtcctaaaaatacgggcaagctcttaactatttaaaaatgaaattacaggcccgggcacggtggctcacacctgtaatcccagcactttgggaggctgaggcaggcagatcatgaggtcaagagatcgagaccagcctggccaacgtggtgaaaccccatctctactaaaaatacaaaaattagccgggtgtggtggcgcgcgcctgttgtcttagctactcaggaggctgaggcaggagaatcgcttgaaaacaggaggtggaggttgcagtgagccgagatcacgccactgcactccagcctggtgacagcgtgagactctttaaaaaaagaaattaaaagagttgagacaaacgtttcctacattcttttccatgtgtaaaatcatgaaaaagcctgtcaccggacttgcattggatgagatgagtcagaccaaaacagtggccacccgtcttcctcctgtgagcctaagtgcagccgtgctagctgcgcaccgtggctaaggatgacgtctgtgttcctgtccatcactgatgctgctggctactgcatgtgccacacctgtctgttcgccattcctaacattctgtttcattcttcctcgggagatatttcaaacatttggtcttttcttttaacactgagggtaggcccttaggaaatttatttaggaaagtctgaacacgttatcacttggttttctggaaagtagcttaccctagaaaacagctgcaaatgccagaaagatgatccctaaaaatgttgagggacttctgttcattcatcccgagaacattggcttccacatcacagtatctacccttacatggtttaggattaaagccaggcaatcttttactatgcattaagacctctgattcaaaacttattagaacagtagcttctgctggaatttgcaatcactgaagtcatagaaaataggtaactatctaattagagaaataattgttgtattttaagatctgagagtgtgtacaagttttagtatacatgccatgccagaagatagtgtatgcaagaagtcttgggaccagaaaatggcaatgataggagactgacatagaagaagaatgcttccctaggaaaaaggtcgctggctttggtgcaagaggaagaagaatgttccactggaagcctgagcacctaatcagctctcagtgatcaacccactcttgttatgggtggtctctgtcactttgaatgccaggctggcttctcgtctagcagtattcagataccccttctgctcagcctgcttggcgttaaaatacaaatcattgaactgagggggaaaaatgtaactaggaagaaaaacccaatttaagaaattacataatgctttccaaaggcacctacaacttagttttaaattacttgctactggggattacccatggatatccttaataggcaggaagtctgggaattctggtggcctctagggcagtgttctcacagcaccgttccgacagggaccagtgaaagaaaagagacaaagttagaacgtgctggggagcggccatttctaaggccagtctggtttaagtagtcatttctgctgaaaaaacagatgatcctggtggaagaaaaggttgaaggcagctgccctcgggagggctgtgatgctcggcacatcctgcctggcacatacacgtgtctgcaggccacaccgtgcatgtccccagacctgccgcctggcttctggagtgcttcaagcagagcatggtgggtcattgaggagacccaggaatctcatctgagaacccactctctgccggagaaccccatggtgacacattttcatctttctgaccagaggctgtttttttttttttttgagacagtctcattctgttgcccaggctggagtgcagtggcttgatctcggctcactgcaacctcgcctcccgggttcaagcaattctctgccgcagcctccagagtagctgggataacaggtgcccaccaccacaccccactaatttttgtatttgtatttttagtagagatggggtttcaccatgttggtcaggctggtcttggactcctgacctcatgctccacccgcttcggcctcccaaagttctgggattacaggtgtgagccaccgtgcacggccggcctgacctttggaaaagccttgtcactttggacgtttgcgtctttgaagaggcgatgggagcatatcatgactgcctgccaccattgcttttcagactaccacaactcaatcatgctgtccaggacttctggccctgtgttcaccactgggaaaacgtacttcagactggatagcctaaaaaggagcaatgcccttgtaggatgtggagaagggaaaatacggacattaacattaaaagacaccagtgaaattgttaggtctctaggaagttggagcacaaggcttcacgctttaagaccatctgtggttttcagtgaacaagcgctgagcaccagcagcagaaaacaacaacaaaaaaacacctcgtttttaccttgtcttctagacatgaaaaggcagttgcattccactctgcattatgttctacatgttgctttatcagtatatgcttagctgtaagtgacaagtattttttctgaacagaagtttacttagaaataccatgcacttgggggtaccaattaaccgcctgaaaattagcatattgatagttcttagagagaccagatataatctaagaatttatatgaaagatttgtatcattagagccagaaataattttatattaatatataatacagattaacattatatataatatgtacctgtgtcacttctgacatgagcctgtaaacatatattcatatatgtacctgcacatgtacccacctgatgtaggtcttattcctttagtatggacttaaagtacttattcatataccttgtaactaaaaattagaacagctccctagaattgtgaacttttaagagtctgactagaaatttgcaacttataaaaaagttacttttaaaaatataagttagggctaggcacagtggctcatgcctataatctcagcacttttgggaggccaagacaggaggatcacttcaggccaggagttcaagatcaaccaacctgggtaacatggccagaccccatctctatttatatatatatatataaaacttagagtttttatcttcccctaaaagaggccgtgatatttgcagcagcctcaaattgctcttaaggggtttaggtgtgcagaagctttcctttccctacccagtaaccatgtgactactaacgtggtatattgatttattttgtttgctgtctgtctcccctgccccactgctggaacagaggctccaagaaaacagggaccttattattcattactgcatccccagtaatgaaagtacttagaaaataattattgaatgaatgaaatctaaactgtgaacctgagggtgtttgtggcagtgtttgttttactgaattgtagaaggacataaccgtgttttcagtgtttctatggaacaaacttgtacattttatttcacttgtgttttgtcttaaaccctactgctggaaacaattttatgtaataagcaatgggcccaaaagtctaggagtttttttgtacttagtgaatttgtatgcaacagagatgctgcagctgatgcctttaaaaggtattcatcatggaagagctgaggcctgtgcttggtgttccagagcccagggttgagcatcctgaaggagccactgcagccgtcactgtccccagagcctgtggagatagagcctgtttgctgctttttcttcccgctcttaagacatggctggagctcagtcttcattgaatgaagtttgctgtggtattgcatagccttgctttcttgaactaaactgtttgcccttcacaagtagttcttctttcaggattagttcgttccaaggaggctcttcagtctcacagataagtagatctctcctgctgtctggacacatttcactcggaaattgaatacaatttgtattcaggctgggaacctgaacacacacttgtgtttttaagcttcccttttttacagtggacaaggacacaaataataaataaatcatccctaatgcccaagaaaaaaa

SEQ ID NO: 3-5 - skipped (3 entries)

SEQ ID NO: 6 - DNA, 21 bp, Artificial sequence
  Primer
ctttcaagttcagtggctcca

SEQ ID NO: 7 - DNA, 22 bp, Artificial sequence
  Primer
cgttttgaggaaagacacactg

SEQ ID NO: 8 - DNA, 35 bp, Artificial sequence
  Probe
agttttgacattttcacagtcaggtatttgtttcc

SEQ ID NO: 9 - DNA, 22 bp, Artificial sequence
  Primer
ggaactgaggccatgattaaga

SEQ ID NO: 10 - DNA, 20 bp, Artificial sequence
  Primer
acctccgactttcgttcttg

SEQ ID NO: 11 - DNA, 23 bp, Artificial sequence
  Probe
aagacggaccagagcgaaagcat

SEQ ID NO: 12 - DNA, 16 bp, Artificial sequence
  Synthetic oligonucleotide
aagcttaaaccatcca

SEQ ID NO: 13 - DNA, 16 bp, Artificial sequence
  Synthetic oligonucleotide
gcatttggtactagta

SEQ ID NO: 14 - DNA, 16 bp, Artificial sequence
  Synthetic oligonucleotide
gggtaagctactttcc

SEQ ID NO: 15 - DNA, 16 bp, Artificial sequence
  Synthetic oligonucleotide
ttgcatttggtactag

SEQ ID NO: 16 - DNA, 16 bp, Artificial sequence
  Synthetic oligonucleotide
ccagataactaagcta

SEQ ID NO: 17 - DNA, 16 bp, Artificial sequence
  Synthetic oligonucleotide
aaagcttaaaccatcc

SEQ ID NO: 18 - DNA, 16 bp, Artificial sequence
  Synthetic oligonucleotide
gtactagtaatattct

SEQ ID NO: 19 - DNA, 16 bp, Artificial sequence
  Synthetic oligonucleotide
ttctagggtaagctac

SEQ ID NO: 20 - DNA, 16 bp, Artificial sequence
  Synthetic oligonucleotide
tcctaaaccatgtaag

SEQ ID NO: 21 - DNA, 16 bp, Artificial sequence
  Synthetic oligonucleotide
gttttggagcaccgat

SEQ ID NO: 22 - DNA, 16 bp, Artificial sequence
  Synthetic oligonucleotide
gtaagtagtgctgctt

SEQ ID NO: 23 - DNA, 16 bp, Artificial sequence
  Synthetic oligonucleotide
agggtagatactgtga

SEQ ID NO: 24 - DNA, 16 bp, Artificial sequence
  Synthetic oligonucleotide
ctgattaggtgctcag

SEQ ID NO: 25 - DNA, 16 bp, Artificial sequence
  Synthetic oligonucleotide
ctttttaggctatcca

SEQ ID NO: 26 - DNA, 16 bp, Artificial sequence
  Synthetic oligonucleotide
cctggctttaatccta

SEQ ID NO: 27 - DNA, 16 bp, Artificial sequence
  Synthetic oligonucleotide
gcatatgtataatccc

SEQ ID NO: 28 - DNA, 16 bp, Artificial sequence
  Synthetic oligonucleotide
aaacttgtacacactc

SEQ ID NO: 29 - DNA, 16 bp, Artificial sequence
  Synthetic oligonucleotide
gttaattggtaccccc

SEQ ID NO: 30 - DNA, 16 bp, Artificial sequence
  Synthetic oligonucleotide
agactgttttggagca

SEQ ID NO: 31 - DNA, 16 bp, Artificial sequence
  Synthetic oligonucleotide
ttaattggtaccccca

SEQ ID NO: 32 - DNA, 16 bp, Artificial sequence
  Synthetic oligonucleotide
ccatgtaagggtagat

SEQ ID NO: 33 - DNA, 16 bp, Artificial sequence
  Synthetic oligonucleotide
ggagcaccgatataga

SEQ ID NO: 34 - DNA, 16 bp, Artificial sequence
  Synthetic oligonucleotide
cggttaattggtaccc

SEQ ID NO: 35 - DNA, 16 bp, Artificial sequence
  Synthetic oligonucleotide
gttagtagtcacatgg

SEQ ID NO: 36 - DNA, 16 bp, Artificial sequence
  Synthetic oligonucleotide
gtttttttctcgataa

SEQ ID NO: 37 - DNA, 16 bp, Artificial sequence
  Synthetic oligonucleotide
tagattatatctggtc

SEQ ID NO: 38 - DNA, 16 bp, Artificial sequence
  Synthetic oligonucleotide
tgaataataaggtccc

SEQ ID NO: 39 - DNA, 16 bp, Artificial sequence
  Synthetic oligonucleotide
ctaattttcaggcggt

SEQ ID NO: 40 - DNA, 16 bp, Artificial sequence
  Synthetic oligonucleotide
cggttatgtccttcta

SEQ ID NO: 41 - DNA, 16 bp, Artificial sequence
  Synthetic oligonucleotide
tgcataactgactccc

SEQ ID NO: 42 - DNA, 16 bp, Artificial sequence
  Synthetic oligonucleotide
actgagcaacattaca

SEQ ID NO: 43 - DNA, 16 bp, Artificial sequence
  Synthetic oligonucleotide
gactgagcaacattac

SEQ ID NO: 44 - DNA, 16 bp, Artificial sequence
  Synthetic oligonucleotide
acaattaattacccca

SEQ ID NO: 45 - DNA, 16 bp, Artificial sequence
  Synthetic oligonucleotide
gggtttacagagttta

SEQ ID NO: 46 - DNA, 16 bp, Artificial sequence
  Synthetic oligonucleotide
gagcaacattacaatc

SEQ ID NO: 47 - DNA, 16 bp, Artificial sequence
  Synthetic oligonucleotide
gcagaatttatatcgc

SEQ ID NO: 48 - DNA, 16 bp, Artificial sequence
  Synthetic oligonucleotide
gtcctagaattgcatt

SEQ ID NO: 49 - DNA, 16 bp, Artificial sequence
  Synthetic oligonucleotide
acaattctagggagct

SEQ ID NO: 50 - DNA, 16 bp, Artificial sequence
  Synthetic oligonucleotide
gtaacttacatagtat

SEQ ID NO: 51 - DNA, 16 bp, Artificial sequence
  Synthetic oligonucleotide
cctttaatgatgtccc

SEQ ID NO: 52 - DNA, 16 bp, Artificial sequence
  Synthetic oligonucleotide
aatttatatcgcttca

SEQ ID NO: 53 - DNA, 16 bp, Artificial sequence
  Synthetic oligonucleotide
caggatttgacttccc

SEQ ID NO: 54 - DNA, 16 bp, Artificial sequence
  Synthetic oligonucleotide
ttctcataaggctggt

SEQ ID NO: 55 - DNA, 16 bp, Artificial sequence
  Synthetic oligonucleotide
gcatagcattcttggc

SEQ ID NO: 56 - DNA, 16 bp, Artificial sequence
  Synthetic oligonucleotide
agaatttatatcgctt

SEQ ID NO: 57 - DNA, 16 bp, Artificial sequence
  Synthetic oligonucleotide
gttttagttacaactc

SEQ ID NO: 58 - DNA, 16 bp, Artificial sequence
  Synthetic oligonucleotide
gtatttgactaagtct

SEQ ID NO: 59 - DNA, 16 bp, Artificial sequence
  Synthetic oligonucleotide
gttagattttgcatca

SEQ ID NO: 60 - DNA, 16 bp, Artificial sequence
  Synthetic oligonucleotide
tctcataaggctggtc

SEQ ID NO: 61 - DNA, 16 bp, Artificial sequence
  Synthetic oligonucleotide
gttgatttcagaccgg

SEQ ID NO: 62 - DNA, 16 bp, Artificial sequence
  Synthetic oligonucleotide
tttagtatgttggctc

SEQ ID NO: 63 - DNA, 16 bp, Artificial sequence
  Synthetic oligonucleotide
cagaatttatatcgct

SEQ ID NO: 64 - DNA, 16 bp, Artificial sequence
  Synthetic oligonucleotide
gttacatcagattctg

SEQ ID NO: 65 - DNA, 16 bp, Artificial sequence
  Synthetic oligonucleotide
acaatcaaggccttgt

SEQ ID NO: 66 - DNA, 16 bp, Artificial sequence
  Synthetic oligonucleotide
tgcaatttaccatcta

SEQ ID NO: 67 - DNA, 16 bp, Artificial sequence
  Synthetic oligonucleotide
tctatttggtgaccct

SEQ ID NO: 68 - DNA, 16 bp, Artificial sequence
  Synthetic oligonucleotide
aggattaattcgccta

SEQ ID NO: 69 - DNA, 16 bp, Artificial sequence
  Synthetic oligonucleotide
gggtttagaccagtgt

SEQ ID NO: 70 - DNA, 16 bp, Artificial sequence
  Synthetic oligonucleotide
aatgttattctatccc

SEQ ID NO: 71 - DNA, 16 bp, Artificial sequence
  Synthetic oligonucleotide
atctatttggtgaccc

SEQ ID NO: 72 - DNA, 16 bp, Artificial sequence
  Synthetic oligonucleotide
ttgtatatgcctctta

SEQ ID NO: 73 - DNA, 16 bp, Artificial sequence
  Synthetic oligonucleotide
cttgagctaatgtcct

SEQ ID NO: 74 - DNA, 16 bp, Artificial sequence
  Synthetic oligonucleotide
catatgatctattcct

SEQ ID NO: 75 - DNA, 16 bp, Artificial sequence
  Synthetic oligonucleotide
tcgattaaacagaggt

SEQ ID NO: 76 - DNA, 16 bp, Artificial sequence
  Synthetic oligonucleotide
tgagcaacattacaat

SEQ ID NO: 77 - DNA, 16 bp, Artificial sequence
  Synthetic oligonucleotide
tgaagtaagagatcct

SEQ ID NO: 78 - DNA, 16 bp, Artificial sequence
  Synthetic oligonucleotide
gttatgattaccacca

SEQ ID NO: 79 - DNA, 16 bp, Artificial sequence
  Synthetic oligonucleotide
actatcgaattctcct

SEQ ID NO: 80 - DNA, 16 bp, Artificial sequence
  Synthetic oligonucleotide
ctttagcccctattca

SEQ ID NO: 81 - DNA, 16 bp, Artificial sequence
  Synthetic oligonucleotide
gttcattacctagctg

SEQ ID NO: 82 - DNA, 16 bp, Artificial sequence
  Synthetic oligonucleotide
ggatttagtatgttgg

SEQ ID NO: 83 - DNA, 16 bp, Artificial sequence
  Synthetic oligonucleotide
ctcataaggctggtct

SEQ ID NO: 84 - DNA, 16 bp, Artificial sequence
  Synthetic oligonucleotide
gtatatcatcccatcc

SEQ ID NO: 85 - DNA, 16 bp, Artificial sequence
  Synthetic oligonucleotide
atgtttaggccttcac

SEQ ID NO: 86 - DNA, 16 bp, Artificial sequence
  Synthetic oligonucleotide
gttattactaagtacc

SEQ ID NO: 87 - DNA, 16 bp, Artificial sequence
  Synthetic oligonucleotide
gcatcattagtgaggt

SEQ ID NO: 88 - DNA, 16 bp, Artificial sequence
  Synthetic oligonucleotide
cctaatccttccccca

SEQ ID NO: 89 - DNA, 16 bp, Artificial sequence
  Synthetic oligonucleotide
agaactatcgaattct

SEQ ID NO: 90 - DNA, 20 bp, Artificial sequence
  Synthetic oligonucleotide
acacttcccttctccctcat

SEQ ID NO: 91 - DNA, 20 bp, Artificial sequence
  Synthetic oligonucleotide
atatctttctttccatctct

SEQ ID NO: 92 - DNA, 20 bp, Artificial sequence
  Synthetic oligonucleotide
agctactttccagaaaacca

SEQ ID NO: 93 - DNA, 20 bp, Artificial sequence
  Synthetic oligonucleotide
tagttctttccaactttctt

SEQ ID NO: 94 - DNA, 20 bp, Artificial sequence
  Synthetic oligonucleotide
cactcagctcctttacattc

SEQ ID NO: 95 - DNA, 20 bp, Artificial sequence
  Synthetic oligonucleotide
ttattcagctttcttcccat

SEQ ID NO: 96 - DNA, 20 bp, Artificial sequence
  Synthetic oligonucleotide
attcttcttcctcttgcacc

SEQ ID NO: 97 - DNA, 20 bp, Artificial sequence
  Synthetic oligonucleotide
acttaattttcctcttctct

SEQ ID NO: 98 - DNA, 20 bp, Artificial sequence
  Synthetic oligonucleotide
ctgtatctctctccagactt

SEQ ID NO: 99 - DNA, 20 bp, Artificial sequence
  Synthetic oligonucleotide
gcacttttacaccatacaac

SEQ ID NO: 100 - DNA, 20 bp, Artificial sequence
  Synthetic oligonucleotide
atgttcccaactccatattc

SEQ ID NO: 101 - DNA, 20 bp, Artificial sequence
  Synthetic oligonucleotide
tggttctcatccatttgtta

SEQ ID NO: 102 - DNA, 20 bp, Artificial sequence
  Synthetic oligonucleotide
acctggatcaccctgcgcat

SEQ ID NO: 103 - DNA, 20 bp, Artificial sequence
  Synthetic oligonucleotide
taagaaccaatttttgtccc

SEQ ID NO: 104 - DNA, 20 bp, Artificial sequence
  Synthetic oligonucleotide
ggtgacatcatcacaaataa

SEQ ID NO: 105 - DNA, 20 bp, Artificial sequence
  Synthetic oligonucleotide
cagccttttttaacttttta

SEQ ID NO: 106 - DNA, 20 bp, Artificial sequence
  Synthetic oligonucleotide
gcttaaaccatccaaagccc

SEQ ID NO: 107 - DNA, 20 bp, Artificial sequence
  Synthetic oligonucleotide
tgatcttcttttcattgggc

SEQ ID NO: 108 - DNA, 20 bp, Artificial sequence
  Synthetic oligonucleotide
ttttgacattttcacagtca

SEQ ID NO: 109 - DNA, 20 bp, Artificial sequence
  Synthetic oligonucleotide
aattaatttcttaatgcaca

SEQ ID NO: 110 - DNA, 20 bp, Artificial sequence
  Synthetic oligonucleotide
ggcaattttttcctaatcct

SEQ ID NO: 111 - DNA, 20 bp, Artificial sequence
  Synthetic oligonucleotide
gtctattttaaataatagct

SEQ ID NO: 112 - DNA, 20 bp, Artificial sequence
  Synthetic oligonucleotide
ctggaataaatattttcaat

SEQ ID NO: 113 - DNA, 20 bp, Artificial sequence
  Synthetic oligonucleotide
tgggctccagcatctacggt

SEQ ID NO: 114 - DNA, 20 bp, Artificial sequence
  Synthetic oligonucleotide
cttttaaaccttataaacat

SEQ ID NO: 115 - DNA, 20 bp, Artificial sequence
  Synthetic oligonucleotide
caaaattacctctcactctc

SEQ ID NO: 116 - DNA, 20 bp, Artificial sequence
  Synthetic oligonucleotide
ccaattatccatcccagttc

SEQ ID NO: 117 - DNA, 20 bp, Artificial sequence
  Synthetic oligonucleotide
atttccaaaacaaccaccac

SEQ ID NO: 118 - DNA, 20 bp, Artificial sequence
  Synthetic oligonucleotide
ctagttggccatcttgctaa

SEQ ID NO: 119 - DNA, 20 bp, Artificial sequence
  Synthetic oligonucleotide
agatcttaaaatacaacaat

SEQ ID NO: 120 - DNA, 20 bp, Artificial sequence
  Synthetic oligonucleotide
tgcctgctttttcttggaca

SEQ ID NO: 121 - DNA, 20 bp, Artificial sequence
  Synthetic oligonucleotide
tcagtgaccatatcaccaca

SEQ ID NO: 122 - DNA, 20 bp, Artificial sequence
  Synthetic oligonucleotide
gaaaaatgctcataatcttc

SEQ ID NO: 123 - DNA, 20 bp, Artificial sequence
  Synthetic oligonucleotide
tcttaatttccttatgcttt

SEQ ID NO: 124 - DNA, 20 bp, Artificial sequence
  Synthetic oligonucleotide
ttcttagattatatctggtc

SEQ ID NO: 125 - DNA, 20 bp, Artificial sequence
  Synthetic oligonucleotide
gcaagcattatttaatttct

SEQ ID NO: 126 - DNA, 20 bp, Artificial sequence
  Synthetic oligonucleotide
agggaagcagccaaatcaat

SEQ ID NO: 127 - DNA, 20 bp, Artificial sequence
  Synthetic oligonucleotide
attcaagctttatttaccca

SEQ ID NO: 128 - DNA, 20 bp, Artificial sequence
  Synthetic oligonucleotide
ctggtttattttttttggct

SEQ ID NO: 129 - DNA, 20 bp, Artificial sequence
  Synthetic oligonucleotide
gcagaatttatatcgcttca

SEQ ID NO: 130 - DNA, 20 bp, Artificial sequence
  Synthetic oligonucleotide
agatacaccactataaccaa

SEQ ID NO: 131 - DNA, 20 bp, Artificial sequence
  Synthetic oligonucleotide
ctagttacactttctttttt

SEQ ID NO: 132 - DNA, 20 bp, Artificial sequence
  Synthetic oligonucleotide
ttgcatatgtataatcccat

SEQ ID NO: 133 - DNA, 20 bp, Artificial sequence
  Synthetic oligonucleotide
cagagggagatttctagccc

SEQ ID NO: 134 - DNA, 20 bp, Artificial sequence
  Synthetic oligonucleotide
attcccagacttcctgccta

SEQ ID NO: 135 - DNA, 20 bp, Artificial sequence
  Synthetic oligonucleotide
acatagttctgattttggac

SEQ ID NO: 136 - DNA, 20 bp, Artificial sequence
  Synthetic oligonucleotide
attttgttattactaagtac

SEQ ID NO: 137 - DNA, 20 bp, Artificial sequence
  Synthetic oligonucleotide
cctgaacttttaagtagaat

SEQ ID NO: 138 - DNA, 20 bp, Artificial sequence
  Synthetic oligonucleotide
acaatatatttacaaagtgt

SEQ ID NO: 139 - DNA, 20 bp, Artificial sequence
  Synthetic oligonucleotide
cctttacattttcaatttct

SEQ ID NO: 140 - DNA, 20 bp, Artificial sequence
  Synthetic oligonucleotide
ttagatttcattcattcaat

SEQ ID NO: 141 - DNA, 20 bp, Artificial sequence
  Synthetic oligonucleotide
agtttcttctactgtagcaa

SEQ ID NO: 142 - DNA, 20 bp, Artificial sequence
  Synthetic oligonucleotide
accctattatttattcactt

SEQ ID NO: 143 - DNA, 20 bp, Artificial sequence
  Synthetic oligonucleotide
gacgatttagatattagaaa

SEQ ID NO: 144 - DNA, 20 bp, Artificial sequence
  Synthetic oligonucleotide
tctacttaaaaaaaatctga

SEQ ID NO: 145 - DNA, 20 bp, Artificial sequence
  Synthetic oligonucleotide
gtttactatatctttaagtc

SEQ ID NO: 146 - DNA, 20 bp, Artificial sequence
  Synthetic oligonucleotide
tctgcaggcctcatctgcat

SEQ ID NO: 147 - DNA, 20 bp, Artificial sequence
  Synthetic oligonucleotide
cccagaactctaatagcctc

SEQ ID NO: 148 - DNA, 20 bp, Artificial sequence
  Synthetic oligonucleotide
tctatagtaacaattattga

SEQ ID NO: 149 - DNA, 20 bp, Artificial sequence
  Synthetic oligonucleotide
tccaatcaatataaactaca

SEQ ID NO: 150 - DNA, 20 bp, Artificial sequence
  Synthetic oligonucleotide
ccttcctcaaatccagagct

SEQ ID NO: 151 - DNA, 20 bp, Artificial sequence
  Synthetic oligonucleotide
tctctagaaaatataattaa

SEQ ID NO: 152 - DNA, 20 bp, Artificial sequence
  Synthetic oligonucleotide
ttgctctttccagttagatc

SEQ ID NO: 153 - DNA, 20 bp, Artificial sequence
  Synthetic oligonucleotide
acctaacaatttcactggtg

SEQ ID NO: 154 - DNA, 20 bp, Artificial sequence
  Synthetic oligonucleotide
agcaactttttcttaccttt

SEQ ID NO: 155 - DNA, 20 bp, Artificial sequence
  Synthetic oligonucleotide
tgctttcaatttttgaacca

SEQ ID NO: 156 - DNA, 20 bp, Artificial sequence
  Synthetic oligonucleotide
agatgttttttctttcccta

SEQ ID NO: 157 - DNA, 20 bp, Artificial sequence
  Synthetic oligonucleotide
ataatttcaacccaacctca

SEQ ID NO: 158 - DNA, 20 bp, Artificial sequence
  Synthetic oligonucleotide
aactgactccctttactctc

SEQ ID NO: 159 - DNA, 20 bp, Artificial sequence
  Synthetic oligonucleotide
ttggacagttttcttagtct

SEQ ID NO: 160 - DNA, 20 bp, Artificial sequence
  Synthetic oligonucleotide
gatgaataccttttaaaggc

SEQ ID NO: 161 - DNA, 20 bp, Artificial sequence
  Synthetic oligonucleotide
tcttatcttccttattgaaa

SEQ ID NO: 162 - DNA, 20 bp, Artificial sequence
  Synthetic oligonucleotide
atcagttgaatcaaatgaga

SEQ ID NO: 163 - DNA, 20 bp, Artificial sequence
  Synthetic oligonucleotide
aggacaatcattactatctc

SEQ ID NO: 164 - DNA, 20 bp, Artificial sequence
  Synthetic oligonucleotide
tcctctcttattatttatca

SEQ ID NO: 165 - DNA, 20 bp, Artificial sequence
  Synthetic oligonucleotide
aagtcatgactctaaatctt

SEQ ID NO: 166 - DNA, 20 bp, Artificial sequence
  Synthetic oligonucleotide
ttcccaaaaaataatttcat

SEQ ID NO: 167 - DNA, 20 bp, Artificial sequence
  Synthetic oligonucleotide
ttcatttaatatgctagctt

SEQ ID NO: 168 - DNA, 20 bp, Artificial sequence
  Synthetic oligonucleotide
tagatttcattcattcaata

SEQ ID NO: 169 - DNA, 20 bp, Artificial sequence
  Synthetic oligonucleotide
tttctagccctttaaatcca

SEQ ID NO: 170 - DNA, 20 bp, Artificial sequence
  Synthetic oligonucleotide
tgttcccaactccatattca

SEQ ID NO: 171 - DNA, 20 bp, Artificial sequence
  Synthetic oligonucleotide
gcaggcctcatctgcatcaa

SEQ ID NO: 172 - DNA, 20 bp, Artificial sequence
  Synthetic oligonucleotide
aatattttcaatcctttcct

SEQ ID NO: 173 - DNA, 20 bp, Artificial sequence
  Synthetic oligonucleotide
aatgtggtacccatcaggtc

SEQ ID NO: 174 - DNA, 20 bp, Artificial sequence
  Synthetic oligonucleotide
tgtgcttatattttcaatta

SEQ ID NO: 175 - DNA, 20 bp, Artificial sequence
  Synthetic oligonucleotide
cttcctcaaatccagagctc

SEQ ID NO: 176 - DNA, 20 bp, Artificial sequence
  Synthetic oligonucleotide
attttgccatatacagggtt

SEQ ID NO: 177 - DNA, 20 bp, Artificial sequence
  Synthetic oligonucleotide
ggccccaacacataatcgga

SEQ ID NO: 178 - DNA, 20 bp, Artificial sequence
  Synthetic oligonucleotide
atgaataccttttaaaggca

SEQ ID NO: 179 - DNA, 20 bp, Artificial sequence
  Synthetic oligonucleotide
cttcccttctccctcatttt

SEQ ID NO: 180 - DNA, 20 bp, Artificial sequence
  Synthetic oligonucleotide
ttacaaagtgtatctaggcc

SEQ ID NO: 181 - DNA, 20 bp, Artificial sequence
  Synthetic oligonucleotide
actcagctcctttacattct

SEQ ID NO: 182 - DNA, 20 bp, Artificial sequence
  Synthetic oligonucleotide
caactttttcttacctttgc

SEQ ID NO: 183 - DNA, 20 bp, Artificial sequence
  Synthetic oligonucleotide
gcaattttttcctaatcctt

SEQ ID NO: 184 - DNA, 20 bp, Artificial sequence
  Synthetic oligonucleotide
gttgaatcaaatgagagact

SEQ ID NO: 185 - DNA, 20 bp, Artificial sequence
  Synthetic oligonucleotide
atctttctttccatctcttt

SEQ ID NO: 186 - DNA, 20 bp, Artificial sequence
  Synthetic oligonucleotide
gaagcagccaaatcaatgga

SEQ ID NO: 187 - DNA, 20 bp, Artificial sequence
  Synthetic oligonucleotide
caattatccatcccagttct

SEQ ID NO: 188 - DNA, 20 bp, Artificial sequence
  Synthetic oligonucleotide
atctctctccagacttggga

SEQ ID NO: 189 - DNA, 20 bp, Artificial sequence
  Synthetic oligonucleotide
cttaattttcctcttctctt

SEQ ID NO: 190 - DNA, 20 bp, Artificial sequence
  Synthetic oligonucleotide
cagtgaccatatcaccacat

SEQ ID NO: 191 - DNA, 20 bp, Artificial sequence
  Synthetic oligonucleotide
gatacaccactataaccaaa

SEQ ID NO: 192 - DNA, 20 bp, Artificial sequence
  Synthetic oligonucleotide
ttcaagctttatttacccaa

SEQ ID NO: 193 - DNA, 20 bp, Artificial sequence
  Synthetic oligonucleotide
atatcgcttcatacttgatt

SEQ ID NO: 194 - DNA, 20 bp, Artificial sequence
  Synthetic oligonucleotide
gggagacaatatctcatggc

SEQ ID NO: 195 - DNA, 20 bp, Artificial sequence
  Synthetic oligonucleotide
ggaaggaacactactggcat

SEQ ID NO: 196 - DNA, 20 bp, Artificial sequence
  Synthetic oligonucleotide
gacattttcacagtcaggta

SEQ ID NO: 197 - DNA, 20 bp, Artificial sequence
  Synthetic oligonucleotide
cccagacttcctgcctatta

SEQ ID NO: 198 - DNA, 20 bp, Artificial sequence
  Synthetic oligonucleotide
tagttggccatcttgctaac

SEQ ID NO: 199 - DNA, 20 bp, Artificial sequence
  Synthetic oligonucleotide
tcttagattatatctggtct

SEQ ID NO: 200 - DNA, 20 bp, Artificial sequence
  Synthetic oligonucleotide
gatgttttttctttccctaa

SEQ ID NO: 201 - DNA, 20 bp, Artificial sequence
  Synthetic oligonucleotide
ttctgctgactctttccatt

SEQ ID NO: 202 - DNA, 20 bp, Artificial sequence
  Synthetic oligonucleotide
ggctccagcatctacggtct

SEQ ID NO: 203 - DNA, 20 bp, Artificial sequence
  Synthetic oligonucleotide
tgtccgtattttcccttctc

SEQ ID NO: 204 - DNA, 20 bp, Artificial sequence
  Synthetic oligonucleotide
atagtaacaattattgatat

SEQ ID NO: 205 - DNA, 20 bp, Artificial sequence
  Synthetic oligonucleotide
ccagaactctaatagcctcc

SEQ ID NO: 206 - DNA, 20 bp, Artificial sequence
  Synthetic oligonucleotide
gttacactttcttttttttc

SEQ ID NO: 207 - DNA, 20 bp, Artificial sequence
  Synthetic oligonucleotide
aatttcataaatcagtggat

SEQ ID NO: 208 - DNA, 20 bp, Artificial sequence
  Synthetic oligonucleotide
ctgactccctttactctctt

SEQ ID NO: 209 - DNA, 20 bp, Artificial sequence
  Synthetic oligonucleotide
gctactttccagaaaaccaa

SEQ ID NO: 210 - DNA, 20 bp, Artificial sequence
  Synthetic oligonucleotide
caagcattatttaatttctc

SEQ ID NO: 211 - DNA, 20 bp, Artificial sequence
  Synthetic oligonucleotide
actaaaccaattcccacatt

SEQ ID NO: 212 - DNA, 20 bp, Artificial sequence
  Synthetic oligonucleotide
ggacaatcattactatctca

SEQ ID NO: 213 - DNA, 20 bp, Artificial sequence
  Synthetic oligonucleotide
ctggatcaccctgcgcatca

SEQ ID NO: 214 - DNA, 20 bp, Artificial sequence
  Synthetic oligonucleotide
gtagaattaattttcattac

SEQ ID NO: 215 - DNA, 20 bp, Artificial sequence
  Synthetic oligonucleotide
tttaaaccttataaacatcc

SEQ ID NO: 216 - DNA, 20 bp, Artificial sequence
  Synthetic oligonucleotide
tctattttaaataatagcta

SEQ ID NO: 217 - DNA, 20 bp, Artificial sequence
  Synthetic oligonucleotide
ccaatcaatataaactacat

SEQ ID NO: 218 - DNA, 20 bp, Artificial sequence
  Synthetic oligonucleotide
ccctattatttattcacttc

SEQ ID NO: 219 - DNA, 20 bp, Artificial sequence
  Synthetic oligonucleotide
ctctagaaaatataattaaa

SEQ ID NO: 220 - DNA, 20 bp, Artificial sequence
  Synthetic oligonucleotide
tttgttattactaagtacca

SEQ ID NO: 221 - DNA, 20 bp, Artificial sequence
  Synthetic oligonucleotide
ggaatgtcaattttatatga

SEQ ID NO: 222 - DNA, 20 bp, Artificial sequence
  Synthetic oligonucleotide
cctctcttattatttatcat

SEQ ID NO: 223 - DNA, 20 bp, Artificial sequence
  Synthetic oligonucleotide
tcctagaattgcatttacta

SEQ ID NO: 224 - DNA, 20 bp, Artificial sequence
  Synthetic oligonucleotide
ttcttcttcctcttgcacca

SEQ ID NO: 225 - DNA, 20 bp, Artificial sequence
  Synthetic oligonucleotide
ttacctctcactctctatca

SEQ ID NO: 226 - DNA, 20 bp, Artificial sequence
  Synthetic oligonucleotide
gctgaaccaaatacaagtct

SEQ ID NO: 227 - DNA, 20 bp, Artificial sequence
  Synthetic oligonucleotide
ttgttagaatttatagattc

SEQ ID NO: 228 - DNA, 20 bp, Artificial sequence
  Synthetic oligonucleotide
aaaaatgctcataatcttca

SEQ ID NO: 229 - DNA, 20 bp, Artificial sequence
  Synthetic oligonucleotide
ctttacattttcaatttctg

SEQ ID NO: 230 - DNA, 20 bp, Artificial sequence
  Synthetic oligonucleotide
tcagctttcttcccattgcc

SEQ ID NO: 231 - DNA, 20 bp, Artificial sequence
  Synthetic oligonucleotide
acactgacttctatattttc

SEQ ID NO: 232 - DNA, 20 bp, Artificial sequence
  Synthetic oligonucleotide
ctcggcctcctaaaatacaa

SEQ ID NO: 233 - DNA, 20 bp, Artificial sequence
  Synthetic oligonucleotide
tgacatcatcacaaataatt

SEQ ID NO: 234 - DNA, 20 bp, Artificial sequence
  Synthetic oligonucleotide
tccaaagcccacataacact

SEQ ID NO: 235 - DNA, 20 bp, Artificial sequence
  Synthetic oligonucleotide
ttccaaaacaaccaccacca

SEQ ID NO: 236 - DNA, 20 bp, Artificial sequence
  Synthetic oligonucleotide
gtcttcccatattttggata

SEQ ID NO: 237 - DNA, 20 bp, Artificial sequence
  Synthetic oligonucleotide
gtcaacatagcaaaccctgt

SEQ ID NO: 238 - DNA, 20 bp, Artificial sequence
  Synthetic oligonucleotide
gatcttaaaatacaacaatt

SEQ ID NO: 239 - DNA, 20 bp, Artificial sequence
  Synthetic oligonucleotide
gctagcttcatagaagtgcc

SEQ ID NO: 240 - DNA, 20 bp, Artificial sequence
  Synthetic oligonucleotide
tttcaacccaacctcactgt

SEQ ID NO: 241 - DNA, 20 bp, Artificial sequence
  Synthetic oligonucleotide
agtcatgactctaaatcttg

SEQ ID NO: 242 - DNA, 20 bp, Artificial sequence
  Synthetic oligonucleotide
tctgaattaacaatcaaggc

SEQ ID NO: 243 - DNA, 20 bp, Artificial sequence
  Synthetic oligonucleotide
gatcttcttttcattgggcc

SEQ ID NO: 244 - DNA, 20 bp, Artificial sequence
  Synthetic oligonucleotide
agttctttccaactttcttt

SEQ ID NO: 245 - DNA, 20 bp, Artificial sequence
  Synthetic oligonucleotide
ctagcttcatagaagtgcca

SEQ ID NO: 246 - DNA, 20 bp, Artificial sequence
  Synthetic oligonucleotide
tacaccactataaccaaatc

SEQ ID NO: 247 - DNA, 20 bp, Artificial sequence
  Synthetic oligonucleotide
atcttcttttcattgggcca

SEQ ID NO: 248 - DNA, 20 bp, Artificial sequence
  Synthetic oligonucleotide
ctccctttactctctttttc

SEQ ID NO: 249 - DNA, 20 bp, Artificial sequence
  Synthetic oligonucleotide
atgtggtacccatcaggtct

SEQ ID NO: 250 - DNA, 20 bp, Artificial sequence
  Synthetic oligonucleotide
taattattttctaagtactt

SEQ ID NO: 251 - DNA, 20 bp, Artificial sequence
  Synthetic oligonucleotide
gcctgacctaatcagatgaa

SEQ ID NO: 252 - DNA, 20 bp, Artificial sequence
  Synthetic oligonucleotide
tttatagattctatgcagcc

SEQ ID NO: 253 - DNA, 20 bp, Artificial sequence
  Synthetic oligonucleotide
tgaccattttttcacatact

SEQ ID NO: 254 - DNA, 20 bp, Artificial sequence
  Synthetic oligonucleotide
tctttccaactttctttccc

SEQ ID NO: 255 - DNA, 20 bp, Artificial sequence
  Synthetic oligonucleotide
gttttttctttccctaaaca

SEQ ID NO: 256 - DNA, 20 bp, Artificial sequence
  Synthetic oligonucleotide
tctttctttccatctctttt

SEQ ID NO: 257 - DNA, 20 bp, Artificial sequence
  Synthetic oligonucleotide
gtatttgtttccatttatac

SEQ ID NO: 258 - DNA, 20 bp, Artificial sequence
  Synthetic oligonucleotide
ttaaaccttataaacatcct

SEQ ID NO: 259 - DNA, 20 bp, Artificial sequence
  Synthetic oligonucleotide
taggctatgatcatatcact

SEQ ID NO: 260 - DNA, 20 bp, Artificial sequence
  Synthetic oligonucleotide
gaattgcatttactagttta

SEQ ID NO: 261 - DNA, 20 bp, Artificial sequence
  Synthetic oligonucleotide
atttgcattttttcagagta

SEQ ID NO: 262 - DNA, 20 bp, Artificial sequence
  Synthetic oligonucleotide
ttcccttctccctcattttt

SEQ ID NO: 263 - DNA, 20 bp, Artificial sequence
  Synthetic oligonucleotide
atattttcaatcctttccta

SEQ ID NO: 264 - DNA, 20 bp, Artificial sequence
  Synthetic oligonucleotide
ccacattaaaaaactcacaa

SEQ ID NO: 265 - DNA, 20 bp, Artificial sequence
  Synthetic oligonucleotide
tagctatgaatattacagta

SEQ ID NO: 266 - DNA, 20 bp, Artificial sequence
  Synthetic oligonucleotide
caagctttatttacccaaat

SEQ ID NO: 267 - DNA, 20 bp, Artificial sequence
  Synthetic oligonucleotide
ccatcttgctaacatcactc

SEQ ID NO: 268 - DNA, 20 bp, Artificial sequence
  Synthetic oligonucleotide
ctcaggttaactatcacccc

SEQ ID NO: 269 - DNA, 20 bp, Artificial sequence
  Synthetic oligonucleotide
tgagctgacatcacatgagt

SEQ ID NO: 270 - DNA, 20 bp, Artificial sequence
  Synthetic oligonucleotide
tctgtgttcccttctatatt

SEQ ID NO: 271 - DNA, 20 bp, Artificial sequence
  Synthetic oligonucleotide
tcctcttgcaccaaagccag

SEQ ID NO: 272 - DNA, 20 bp, Artificial sequence
  Synthetic oligonucleotide
tttcattactatttgagaca

SEQ ID NO: 273 - DNA, 20 bp, Artificial sequence
  Synthetic oligonucleotide
tcatgactctaaatcttgga

SEQ ID NO: 274 - DNA, 20 bp, Artificial sequence
  Synthetic oligonucleotide
cagctttcttcccattgcca

SEQ ID NO: 275 - DNA, 20 bp, Artificial sequence
  Synthetic oligonucleotide
tttacattttcaatttctgc

SEQ ID NO: 276 - DNA, 20 bp, Artificial sequence
  Synthetic oligonucleotide
cactgacttctatattttct

SEQ ID NO: 277 - DNA, 20 bp, Artificial sequence
  Synthetic oligonucleotide
accgtcccaagtatttgcca

SEQ ID NO: 278 - DNA, 20 bp, Artificial sequence
  Synthetic oligonucleotide
gtccgtattttcccttctcc

SEQ ID NO: 279 - DNA, 20 bp, Artificial sequence
  Synthetic oligonucleotide
gcctcatctgcatcaagggt

SEQ ID NO: 280 - DNA, 20 bp, Artificial sequence
  Synthetic oligonucleotide
atcaatataaactacatgca

SEQ ID NO: 281 - DNA, 20 bp, Artificial sequence
  Synthetic oligonucleotide
taaggtttaattcttttctc

SEQ ID NO: 282 - DNA, 20 bp, Artificial sequence
  Synthetic oligonucleotide
ttaattttcctcttctcttt

SEQ ID NO: 283 - DNA, 20 bp, Artificial sequence
  Synthetic oligonucleotide
gacatcatcacaaataattg

SEQ ID NO: 284 - DNA, 20 bp, Artificial sequence
  Synthetic oligonucleotide
gcttatattttcaattatga

SEQ ID NO: 285 - DNA, 20 bp, Artificial sequence
  Synthetic oligonucleotide
tagggatgatttatttatta

SEQ ID NO: 286 - DNA, 20 bp, Artificial sequence
  Synthetic oligonucleotide
ttggatagttttcttaatct

SEQ ID NO: 287 - DNA, 20 bp, Artificial sequence
  Synthetic oligonucleotide
tgctgactctttccatttct

SEQ ID NO: 288 - DNA, 20 bp, Artificial sequence
  Synthetic oligonucleotide
ccaaagcccacataacacta

SEQ ID NO: 289 - DNA, 20 bp, Artificial sequence
  Synthetic oligonucleotide
aagcattatttaatttctct

SEQ ID NO: 290 - DNA, 20 bp, Artificial sequence
  Synthetic oligonucleotide
caattttttcctaatccttc

SEQ ID NO: 291 - DNA, 20 bp, Artificial sequence
  Synthetic oligonucleotide
tagtaacaattattgatata

SEQ ID NO: 292 - DNA, 20 bp, Artificial sequence
  Synthetic oligonucleotide
tgagcagaccacctgaggta

SEQ ID NO: 293 - DNA, 20 bp, Artificial sequence
  Synthetic oligonucleotide
ttcaacccaacctcactgtt

SEQ ID NO: 294 - DNA, 20 bp, Artificial sequence
  Synthetic oligonucleotide
cctctcactctctatcaacc

SEQ ID NO: 295 - DNA, 20 bp, Artificial sequence
  Synthetic oligonucleotide
ctagaaaatataattaaatc

SEQ ID NO: 296 - DNA, 20 bp, Artificial sequence
  Synthetic oligonucleotide
cttagattatatctggtctc

SEQ ID NO: 297 - DNA, 20 bp, Artificial sequence
  Synthetic oligonucleotide
ccaactccatattcagggac

SEQ ID NO: 298 - DNA, 20 bp, Artificial sequence
  Synthetic oligonucleotide
gttcagactttcctaaataa

SEQ ID NO: 299 - DNA, 20 bp, Artificial sequence
  Synthetic oligonucleotide
tgaataccttttaaaggcat

SEQ ID NO: 300 - DNA, 20 bp, Artificial sequence
  Synthetic oligonucleotide
actttttcttacctttgcga

SEQ ID NO: 301 - DNA, 20 bp, Artificial sequence
  Synthetic oligonucleotide
accaaatacaagtctacctt

SEQ ID NO: 302 - DNA, 20 bp, Artificial sequence
  Synthetic oligonucleotide
ggttttgttttttttagcac

SEQ ID NO: 303 - DNA, 20 bp, Artificial sequence
  Synthetic oligonucleotide
gtgaccatatcaccacatca

SEQ ID NO: 304 - DNA, 20 bp, Artificial sequence
  Synthetic oligonucleotide
ttgtatatgcctcttacctt

SEQ ID NO: 305 - DNA, 20 bp, Artificial sequence
  Synthetic oligonucleotide
ccagacttcctgcctattaa

SEQ ID NO: 306 - DNA, 20 bp, Artificial sequence
  Synthetic oligonucleotide
ctgaattaacaatcaaggcc

SEQ ID NO: 307 - DNA, 20 bp, Artificial sequence
  Synthetic oligonucleotide
attatttattcacttctgaa

SEQ ID NO: 308 - DNA, 20 bp, Artificial sequence
  Synthetic oligonucleotide
aaaatgctcataatcttcat

SEQ ID NO: 309 - DNA, 20 bp, Artificial sequence
  Synthetic oligonucleotide
atttcataaatcagtggata

SEQ ID NO: 310 - DNA, 20 bp, Artificial sequence
  Synthetic oligonucleotide
aagcagccaaatcaatggaa

SEQ ID NO: 311 - DNA, 20 bp, Artificial sequence
  Synthetic oligonucleotide
accctgcgcatcacttgaca

SEQ ID NO: 312 - DNA, 20 bp, Artificial sequence
  Synthetic oligonucleotide
aaggtgtaacaacaacaacc

SEQ ID NO: 313 - DNA, 20 bp, Artificial sequence
  Synthetic oligonucleotide
ctgactggtttccttatctc

SEQ ID NO: 314 - DNA, 20 bp, Artificial sequence
  Synthetic oligonucleotide
ggacagccccctcccaagga

SEQ ID NO: 315 - DNA, 20 bp, Artificial sequence
  Synthetic oligonucleotide
cggcctcctaaaatacaaac

SEQ ID NO: 316 - DNA, 20 bp, Artificial sequence
  Synthetic oligonucleotide
atactttctatttactggta

SEQ ID NO: 317 - DNA, 20 bp, Artificial sequence
  Synthetic oligonucleotide
tttcttttttttcttaagcc

SEQ ID NO: 318 - DNA, 20 bp, Artificial sequence
  Synthetic oligonucleotide
aaagcttttttcacatcaaa

SEQ ID NO: 319 - DNA, 20 bp, Artificial sequence
  Synthetic oligonucleotide
tcagctcctttacattctta

SEQ ID NO: 320 - DNA, 20 bp, Artificial sequence
  Synthetic oligonucleotide
aatacaacaattatttctct

SEQ ID NO: 321 - DNA, 20 bp, Artificial sequence
  Synthetic oligonucleotide
atcattactatctcatgcta

SEQ ID NO: 322 - DNA, 20 bp, Artificial sequence
  Synthetic oligonucleotide
tgactggtttccttatctct

SEQ ID NO: 323 - DNA, 20 bp, Artificial sequence
  Synthetic oligonucleotide
aagcttttttcacatcaaac

SEQ ID NO: 324 - DNA, 20 bp, Artificial sequence
  Synthetic oligonucleotide
ttttctttccctaaacaggg

SEQ ID NO: 325 - DNA, 20 bp, Artificial sequence
  Synthetic oligonucleotide
gcatccaacaacaccgactt

SEQ ID NO: 326 - DNA, 20 bp, Artificial sequence
  Synthetic oligonucleotide
aagctttatttacccaaatc

SEQ ID NO: 327 - DNA, 20 bp, Artificial sequence
  Synthetic oligonucleotide
tgatgattcccttctgacct

SEQ ID NO: 328 - DNA, 20 bp, Artificial sequence
  Synthetic oligonucleotide
catcttgctaacatcactct

SEQ ID NO: 329 - DNA, 20 bp, Artificial sequence
  Synthetic oligonucleotide
tgagacaaaaatcccaagta

SEQ ID NO: 330 - DNA, 20 bp, Artificial sequence
  Synthetic oligonucleotide
gaccattttttcacatactt

SEQ ID NO: 331 - DNA, 20 bp, Artificial sequence
  Synthetic oligonucleotide
ttgtttccatttatacaaat

SEQ ID NO: 332 - DNA, 20 bp, Artificial sequence
  Synthetic oligonucleotide
tagagagttcttactttcct

SEQ ID NO: 333 - DNA, 20 bp, Artificial sequence
  Synthetic oligonucleotide
tcttgcaccaaagccagcga

SEQ ID NO: 334 - DNA, 20 bp, Artificial sequence
  Synthetic oligonucleotide
atcagatgaaccccttaaaa

SEQ ID NO: 335 - DNA, 20 bp, Artificial sequence
  Synthetic oligonucleotide
gcattatttaatttctctct

SEQ ID NO: 336 - DNA, 20 bp, Artificial sequence
  Synthetic oligonucleotide
cagctcctttacattcttaa

SEQ ID NO: 337 - DNA, 20 bp, Artificial sequence
  Synthetic oligonucleotide
agctgacatcacatgagtgc

SEQ ID NO: 338 - DNA, 20 bp, Artificial sequence
  Synthetic oligonucleotide
tcccttctccctcatttttt

SEQ ID NO: 339 - DNA, 20 bp, Artificial sequence
  Synthetic oligonucleotide
gacagccccctcccaaggaa

SEQ ID NO: 340 - DNA, 20 bp, Artificial sequence
  Synthetic oligonucleotide
gctatgaatattacagtaca

SEQ ID NO: 341 - DNA, 20 bp, Artificial sequence
  Synthetic oligonucleotide
gctgactctttccatttctt

SEQ ID NO: 342 - DNA, 20 bp, Artificial sequence
  Synthetic oligonucleotide
tgtatatgcctcttaccttt

SEQ ID NO: 343 - DNA, 20 bp, Artificial sequence
  Synthetic oligonucleotide
gaccatatcaccacatcaca

SEQ ID NO: 344 - DNA, 20 bp, Artificial sequence
  Synthetic oligonucleotide
tggatagttttcttaatcta

SEQ ID NO: 345 - DNA, 20 bp, Artificial sequence
  Synthetic oligonucleotide
agcagccaaatcaatggaat

SEQ ID NO: 346 - DNA, 20 bp, Artificial sequence
  Synthetic oligonucleotide
tccgtattttcccttctcca

SEQ ID NO: 347 - DNA, 20 bp, Artificial sequence
  Synthetic oligonucleotide
agggatgatttatttattat

SEQ ID NO: 348 - DNA, 20 bp, Artificial sequence
  Synthetic oligonucleotide
acaccactataaccaaatca

SEQ ID NO: 349 - DNA, 20 bp, Artificial sequence
  Synthetic oligonucleotide
attgatatattatccagtat

SEQ ID NO: 350 - DNA, 20 bp, Artificial sequence
  Synthetic oligonucleotide
accttgtttttcaaaatgga

SEQ ID NO: 351 - DNA, 20 bp, Artificial sequence
  Synthetic oligonucleotide
gacttcctgcctattaagga

SEQ ID NO: 352 - DNA, 20 bp, Artificial sequence
  Synthetic oligonucleotide
gccaaacaaaaaactgtgat

SEQ ID NO: 353 - DNA, 20 bp, Artificial sequence
  Synthetic oligonucleotide
catcaggtctccccatcctc

SEQ ID NO: 354 - DNA, 20 bp, Artificial sequence
  Synthetic oligonucleotide
atacaacaattatttctcta

SEQ ID NO: 355 - DNA, 20 bp, Artificial sequence
  Synthetic oligonucleotide
atgactctaaatcttggaat

SEQ ID NO: 356 - DNA, 20 bp, Artificial sequence
  Synthetic oligonucleotide
cagtaatgaataataaggtc

SEQ ID NO: 357 - DNA, 20 bp, Artificial sequence
  Synthetic oligonucleotide
ggcaatagccccactggctg

SEQ ID NO: 358 - DNA, 20 bp, Artificial sequence
  Synthetic oligonucleotide
attttcctcttctcttttct

SEQ ID NO: 359 - DNA, 20 bp, Artificial sequence
  Synthetic oligonucleotide
ggcctcctaaaatacaaact

SEQ ID NO: 360 - DNA, 20 bp, Artificial sequence
  Synthetic oligonucleotide
ctttctttccatctcttttc

SEQ ID NO: 361 - DNA, 20 bp, Artificial sequence
  Synthetic oligonucleotide
aattttttcctaatccttcc

SEQ ID NO: 362 - DNA, 20 bp, Artificial sequence
  Synthetic oligonucleotide
aaggtttaattcttttctct

SEQ ID NO: 363 - DNA, 20 bp, Artificial sequence
  Synthetic oligonucleotide
tgaggtatacacaaaagact

SEQ ID NO: 364 - DNA, 20 bp, Artificial sequence
  Synthetic oligonucleotide
tactctctttttctcttcaa

SEQ ID NO: 365 - DNA, 20 bp, Artificial sequence
  Synthetic oligonucleotide
gcccacataacactatcttt

SEQ ID NO: 366 - DNA, 20 bp, Artificial sequence
  Synthetic oligonucleotide
ctttccaactttctttccca

SEQ ID NO: 367 - DNA, 20 bp, Artificial sequence
  Synthetic oligonucleotide
tctgttgcatacaaattcac

SEQ ID NO: 368 - DNA, 20 bp, Artificial sequence
  Synthetic oligonucleotide
ctcactctctatcaaccttg

SEQ ID NO: 369 - DNA, 20 bp, Artificial sequence
  Synthetic oligonucleotide
tacattttcaatttctgcaa

SEQ ID NO: 370 - DNA, 20 bp, Artificial sequence
  Synthetic oligonucleotide
ttcaatcctttcctataaca

SEQ ID NO: 371 - DNA, 20 bp, Artificial sequence
  Synthetic oligonucleotide
atggtgggaatatttatatc

SEQ ID NO: 372 - DNA, 20 bp, Artificial sequence
  Synthetic oligonucleotide
gtacaatgccatatcttcaa

SEQ ID NO: 373 - DNA, 20 bp, Artificial sequence
  Synthetic oligonucleotide
tcaacccaacctcactgttt

SEQ ID NO: 374 - DNA, 20 bp, Artificial sequence
  Synthetic oligonucleotide
tcattactatctcatgctat

SEQ ID NO: 375 - DNA, 20 bp, Artificial sequence
  Synthetic oligonucleotide
atgctcataatcttcatttt

SEQ ID NO: 376 - DNA, 20 bp, Artificial sequence
  Synthetic oligonucleotide
ttcagactttcctaaataaa

SEQ ID NO: 377 - DNA, 20 bp, Artificial sequence
  Synthetic oligonucleotide
agagttatttcttaactctt

SEQ ID NO: 378 - DNA, 20 bp, Artificial sequence
  Synthetic oligonucleotide
agtatgactatttttatgac

SEQ ID NO: 379 - DNA, 20 bp, Artificial sequence
  Synthetic oligonucleotide
tagaaaatataattaaatca

SEQ ID NO: 380 - DNA, 20 bp, Artificial sequence
  Synthetic oligonucleotide
gcactttgaatacactggtc

SEQ ID NO: 381 - DNA, 20 bp, Artificial sequence
  Synthetic oligonucleotide
ctttttcttacctttgcgaa

SEQ ID NO: 382 - DNA, 20 bp, Artificial sequence
  Synthetic oligonucleotide
tgtgttcccttctatattcc

SEQ ID NO: 383 - DNA, 20 bp, Artificial sequence
  Synthetic oligonucleotide
catgcagttctcttttatca

SEQ ID NO: 384 - DNA, 20 bp, Artificial sequence
  Synthetic oligonucleotide
gtctctctaagaactatcaa

SEQ ID NO: 385 - DNA, 20 bp, Artificial sequence
  Synthetic oligonucleotide
caagtatttgccaaacagca

SEQ ID NO: 386 - DNA, 20 bp, Artificial sequence
  Synthetic oligonucleotide
agctttcttcccattgccac

SEQ ID NO: 387 - DNA, 20 bp, Artificial sequence
  Synthetic oligonucleotide
ccttaggacatcccagacat

SEQ ID NO: 388 - DNA, 20 bp, Artificial sequence
  Synthetic oligonucleotide
ttatgaaacatttttcgatt

SEQ ID NO: 389 - DNA, 20 bp, Artificial sequence
  Synthetic oligonucleotide
taaaccttataaacatcctt

SEQ ID NO: 390 - DNA, 20 bp, Artificial sequence
  Synthetic oligonucleotide
ggtgtaacaacaacaaccgc

SEQ ID NO: 391 - DNA, 20 bp, Artificial sequence
  Synthetic oligonucleotide
tgcattttttcagagtatcc

SEQ ID NO: 392 - DNA, 20 bp, Artificial sequence
  Synthetic oligonucleotide
ccagtaagaaccccagatat

SEQ ID NO: 393 - DNA, 20 bp, Artificial sequence
  Synthetic oligonucleotide
ttatagattctatgcagcca

SEQ ID NO: 394 - DNA, 20 bp, Artificial sequence
  Synthetic oligonucleotide
tcaggttaactatcacccca

SEQ ID NO: 395 - DNA, 20 bp, Artificial sequence
  Synthetic oligonucleotide
cagtggataatcctggatca

SEQ ID NO: 396 - DNA, 20 bp, Artificial sequence
  Synthetic oligonucleotide
acatcatcacaaataattga

SEQ ID NO: 397 - DNA, 20 bp, Artificial sequence
  Synthetic oligonucleotide
tgaattaacaatcaaggcct

SEQ ID NO: 398 - DNA, 20 bp, Artificial sequence
  Synthetic oligonucleotide
aggtagttcattttcaacta

SEQ ID NO: 399 - DNA, 20 bp, Artificial sequence
  Synthetic oligonucleotide
tctctttttctcttcaagac

SEQ ID NO: 400 - DNA, 20 bp, Artificial sequence
  Synthetic oligonucleotide
accaaaaatatacactagca

SEQ ID NO: 401 - DNA, 20 bp, Artificial sequence
  Synthetic oligonucleotide
tcagactttcctaaataaat

SEQ ID NO: 402 - DNA, 20 bp, Artificial sequence
  Synthetic oligonucleotide
accattttttcacatacttg

SEQ ID NO: 403 - DNA, 20 bp, Artificial sequence
  Synthetic oligonucleotide
gggatgatttatttattatt

SEQ ID NO: 404 - DNA, 20 bp, Artificial sequence
  Synthetic oligonucleotide
tggtgggaatatttatatca

SEQ ID NO: 405 - DNA, 20 bp, Artificial sequence
  Synthetic oligonucleotide
acagccccctcccaaggaac

SEQ ID NO: 406 - DNA, 20 bp, Artificial sequence
  Synthetic oligonucleotide
atattagaatccatctattt

SEQ ID NO: 407 - DNA, 20 bp, Artificial sequence
  Synthetic oligonucleotide
aggtctccccatcctcaatt

SEQ ID NO: 408 - DNA, 20 bp, Artificial sequence
  Synthetic oligonucleotide
aagccagcgacctttttcct

SEQ ID NO: 409 - DNA, 20 bp, Artificial sequence
  Synthetic oligonucleotide
tacaacaattatttctctaa

SEQ ID NO: 410 - DNA, 20 bp, Artificial sequence
  Synthetic oligonucleotide
ctttctatatattttttgca

SEQ ID NO: 411 - DNA, 20 bp, Artificial sequence
  Synthetic oligonucleotide
ttgatatattatccagtata

SEQ ID NO: 412 - DNA, 20 bp, Artificial sequence
  Synthetic oligonucleotide
tgttgcatacaaattcacta

SEQ ID NO: 413 - DNA, 20 bp, Artificial sequence
  Synthetic oligonucleotide
gtatgactatttttatgact

SEQ ID NO: 414 - DNA, 20 bp, Artificial sequence
  Synthetic oligonucleotide
tcctttacattcttaaagga

SEQ ID NO: 415 - DNA, 20 bp, Artificial sequence
  Synthetic oligonucleotide
ctgactctttccatttcttc

SEQ ID NO: 416 - DNA, 20 bp, Artificial sequence
  Synthetic oligonucleotide
tatagataacaaaactgcct

SEQ ID NO: 417 - DNA, 20 bp, Artificial sequence
  Synthetic oligonucleotide
tatgcctcttaccttttctc

SEQ ID NO: 418 - DNA, 20 bp, Artificial sequence
  Synthetic oligonucleotide
gcagaagattcttcaatggc

SEQ ID NO: 419 - DNA, 20 bp, Artificial sequence
  Synthetic oligonucleotide
caacccaacctcactgttta

SEQ ID NO: 420 - DNA, 20 bp, Artificial sequence
  Synthetic oligonucleotide
atcttgctaacatcactctc

SEQ ID NO: 421 - DNA, 20 bp, Artificial sequence
  Synthetic oligonucleotide
tcaatcctttcctataacac

SEQ ID NO: 422 - DNA, 20 bp, Artificial sequence
  Synthetic oligonucleotide
gcttagatttccaatagaaa

SEQ ID NO: 423 - DNA, 20 bp, Artificial sequence
  Synthetic oligonucleotide
tactatctcatgctatgtta

SEQ ID NO: 424 - DNA, 20 bp, Artificial sequence
  Synthetic oligonucleotide
aatcttggaatagctaggga

SEQ ID NO: 425 - DNA, 20 bp, Artificial sequence
  Synthetic oligonucleotide
ttcctcttctcttttctcta

SEQ ID NO: 426 - DNA, 20 bp, Artificial sequence
  Synthetic oligonucleotide
aagtatttgccaaacagcaa

SEQ ID NO: 427 - DNA, 20 bp, Artificial sequence
  Synthetic oligonucleotide
agttatttctatttttggtt

SEQ ID NO: 428 - DNA, 20 bp, Artificial sequence
  Synthetic oligonucleotide
tcccaagtaacatttatttt

SEQ ID NO: 429 - DNA, 20 bp, Artificial sequence
  Synthetic oligonucleotide
gcttttttcacatcaaacca

SEQ ID NO: 430 - DNA, 20 bp, Artificial sequence
  Synthetic oligonucleotide
gactggtttccttatctctc

SEQ ID NO: 431 - DNA, 20 bp, Artificial sequence
  Synthetic oligonucleotide
tgggtcttccccagaagcca

SEQ ID NO: 432 - DNA, 20 bp, Artificial sequence
  Synthetic oligonucleotide
attttttcctaatccttccc

SEQ ID NO: 433 - DNA, 20 bp, Artificial sequence
  Synthetic oligonucleotide
gatagttttcttaatctaga

SEQ ID NO: 434 - DNA, 20 bp, Artificial sequence
  Synthetic oligonucleotide
aggacatcccagacattcct

SEQ ID NO: 435 - DNA, 20 bp, Artificial sequence
  Synthetic oligonucleotide
ccgtattttcccttctccac

SEQ ID NO: 436 - DNA, 20 bp, Artificial sequence
  Synthetic oligonucleotide
gtgtaacaacaacaaccgcc

SEQ ID NO: 437 - DNA, 20 bp, Artificial sequence
  Synthetic oligonucleotide
tagcaagtaatttaaaacta

SEQ ID NO: 438 - DNA, 20 bp, Artificial sequence
  Synthetic oligonucleotide
tccctgttttcttggagcct

SEQ ID NO: 439 - DNA, 20 bp, Artificial sequence
  Synthetic oligonucleotide
ttctttccatctcttttctc

SEQ ID NO: 440 - DNA, 20 bp, Artificial sequence
  Synthetic oligonucleotide
gatgtgtatcactattgcct

SEQ ID NO: 441 - DNA, 20 bp, Artificial sequence
  Synthetic oligonucleotide
gctttcttcccattgccacc

SEQ ID NO: 442 - DNA, 20 bp, Artificial sequence
  Synthetic oligonucleotide
catcatcacaaataattgac

SEQ ID NO: 443 - DNA, 20 bp, Artificial sequence
  Synthetic oligonucleotide
gaaaatataattaaatcact

SEQ ID NO: 444 - DNA, 20 bp, Artificial sequence
  Synthetic oligonucleotide
tctaagaactatcaatatgc

SEQ ID NO: 445 - DNA, 20 bp, Artificial sequence
  Synthetic oligonucleotide
aaccttataaacatcctttt

SEQ ID NO: 446 - DNA, 20 bp, Artificial sequence
  Synthetic oligonucleotide
tttccaactttctttcccac

SEQ ID NO: 447 - DNA, 20 bp, Artificial sequence
  Synthetic oligonucleotide
tatgaatattacagtacaca

SEQ ID NO: 448 - DNA, 20 bp, Artificial sequence
  Synthetic oligonucleotide
agctttatttacccaaatca

SEQ ID NO: 449 - DNA, 20 bp, Artificial sequence
  Synthetic oligonucleotide
tccagactgttttggagcac

SEQ ID NO: 450 - DNA, 20 bp, Artificial sequence
  Synthetic oligonucleotide
gccttgttcataccttatct

SEQ ID NO: 451 - DNA, 20 bp, Artificial sequence
  Synthetic oligonucleotide
cattatttaatttctctcta

SEQ ID NO: 452 - DNA, 20 bp, Artificial sequence
  Synthetic oligonucleotide
ttcaagatataccctagctc

SEQ ID NO: 453 - DNA, 20 bp, Artificial sequence
  Synthetic oligonucleotide
cactttgaatacactggtct

SEQ ID NO: 454 - DNA, 20 bp, Artificial sequence
  Synthetic oligonucleotide
gtatccagcataatggtgca

SEQ ID NO: 455 - DNA, 20 bp, Artificial sequence
  Synthetic oligonucleotide
gaggtatacacaaaagacta

SEQ ID NO: 456 - DNA, 20 bp, Artificial sequence
  Synthetic oligonucleotide
tgttcccttctatattcctc

SEQ ID NO: 457 - DNA, 20 bp, Artificial sequence
  Synthetic oligonucleotide
gtagttcattttcaactaga

SEQ ID NO: 458 - DNA, 20 bp, Artificial sequence
  Synthetic oligonucleotide
cccttctccctcattttttc

SEQ ID NO: 459 - DNA, 20 bp, Artificial sequence
  Synthetic oligonucleotide
cactctctatcaaccttgta

SEQ ID NO: 460 - DNA, 20 bp, Artificial sequence
  Synthetic oligonucleotide
agagagttcttactttcctt

SEQ ID NO: 461 - DNA, 20 bp, Artificial sequence
  Synthetic oligonucleotide
caggttaactatcaccccaa

SEQ ID NO: 462 - DNA, 20 bp, Artificial sequence
  Synthetic oligonucleotide
accactataaccaaatcaga

SEQ ID NO: 463 - DNA, 20 bp, Artificial sequence
  Synthetic oligonucleotide
tttttcttacctttgcgaaa

SEQ ID NO: 464 - DNA, 20 bp, Artificial sequence
  Synthetic oligonucleotide
gatgattcccttctgacctc

SEQ ID NO: 465 - DNA, 20 bp, Artificial sequence
  Synthetic oligonucleotide
tttctttccctaaacaggga

SEQ ID NO: 466 - DNA, 20 bp, Artificial sequence
  Synthetic oligonucleotide
tgcagttctcttttatcagc

SEQ ID NO: 467 - DNA, 20 bp, Artificial sequence
  Synthetic oligonucleotide
gcctcctaaaatacaaactg

SEQ ID NO: 468 - DNA, 20 bp, Artificial sequence
  Synthetic oligonucleotide
acattttcaatttctgcaac

SEQ ID NO: 469 - DNA, 20 bp, Artificial sequence
  Synthetic oligonucleotide
cttaaaagaggatctaggcc

SEQ ID NO: 470 - DNA, 20 bp, Artificial sequence
  Synthetic oligonucleotide
accatatcaccacatcacac

SEQ ID NO: 471 - DNA, 20 bp, Artificial sequence
  Synthetic oligonucleotide
ttaattcttttctctttctc

SEQ ID NO: 472 - DNA, 20 bp, Artificial sequence
  Synthetic oligonucleotide
attttgttaatatctgagtt

SEQ ID NO: 473 - DNA, 20 bp, Artificial sequence
  Synthetic oligonucleotide
acagagtttaacaaaagatc

SEQ ID NO: 474 - DNA, 20 bp, Artificial sequence
  Synthetic oligonucleotide
ttccatttatacaaatggtt

SEQ ID NO: 475 - DNA, 20 bp, Artificial sequence
  Synthetic oligonucleotide
gtgtcataaaaaaagtctca

SEQ ID NO: 476 - DNA, 20 bp, Artificial sequence
  Synthetic oligonucleotide
gtgcattcacaggaactcct

SEQ ID NO: 477 - DNA, 20 bp, Artificial sequence
  Synthetic oligonucleotide
ttgttaatatttacggagca

SEQ ID NO: 478 - DNA, 20 bp, Artificial sequence
  Synthetic oligonucleotide
gaattacttttattatgtct

SEQ ID NO: 479 - DNA, 20 bp, Artificial sequence
  Synthetic oligonucleotide
tgctatgttattacatgaaa

SEQ ID NO: 480 - DNA, 20 bp, Artificial sequence
  Synthetic oligonucleotide
atataattaaatcactgata

SEQ ID NO: 481 - DNA, 20 bp, Artificial sequence
  Synthetic oligonucleotide
ttttttcctaatccttcccc

SEQ ID NO: 482 - DNA, 20 bp, Artificial sequence
  Synthetic oligonucleotide
ctttatttacccaaatcata

SEQ ID NO: 483 - DNA, 20 bp, Artificial sequence
  Synthetic oligonucleotide
tatattatccagtataggtt

SEQ ID NO: 484 - DNA, 20 bp, Artificial sequence
  Synthetic oligonucleotide
ctctttttctcttcaagaca

SEQ ID NO: 485 - DNA, 20 bp, Artificial sequence
  Synthetic oligonucleotide
agcaagtaatttaaaactaa

SEQ ID NO: 486 - DNA, 20 bp, Artificial sequence
  Synthetic oligonucleotide
agccagcgacctttttccta

SEQ ID NO: 487 - DNA, 20 bp, Artificial sequence
  Synthetic oligonucleotide
caatcctttcctataacaca

SEQ ID NO: 488 - DNA, 20 bp, Artificial sequence
  Synthetic oligonucleotide
tgcctcttaccttttctcct

SEQ ID NO: 489 - DNA, 20 bp, Artificial sequence
  Synthetic oligonucleotide
ccaagtaacatttattttgc

SEQ ID NO: 490 - DNA, 20 bp, Artificial sequence
  Synthetic oligonucleotide
taattcttttctctttctcc

SEQ ID NO: 491 - DNA, 20 bp, Artificial sequence
  Synthetic oligonucleotide
actggtttccttatctctct

SEQ ID NO: 492 - DNA, 20 bp, Artificial sequence
  Synthetic oligonucleotide
ttgtagtatttacaatatct

SEQ ID NO: 493 - DNA, 20 bp, Artificial sequence
  Synthetic oligonucleotide
ccaaaaatatacactagcat

SEQ ID NO: 494 - DNA, 20 bp, Artificial sequence
  Synthetic oligonucleotide
gcatacaaattcactaagta

SEQ ID NO: 495 - DNA, 20 bp, Artificial sequence
  Synthetic oligonucleotide
ttctttccctaaacagggaa

SEQ ID NO: 496 - DNA, 20 bp, Artificial sequence
  Synthetic oligonucleotide
gcagcagcaagtactacaaa

SEQ ID NO: 497 - DNA, 20 bp, Artificial sequence
  Synthetic oligonucleotide
actctctatcaaccttgtaa

SEQ ID NO: 498 - DNA, 20 bp, Artificial sequence
  Synthetic oligonucleotide
ccctcccaaggaactatcca

SEQ ID NO: 499 - DNA, 20 bp, Artificial sequence
  Synthetic oligonucleotide
gatcatgttatcaaagatcc

SEQ ID NO: 500 - DNA, 20 bp, Artificial sequence
  Synthetic oligonucleotide
atcccagacattcctttcca

SEQ ID NO: 501 - DNA, 20 bp, Artificial sequence
  Synthetic oligonucleotide
cttttttcacatcaaaccaa

SEQ ID NO: 502 - DNA, 20 bp, Artificial sequence
  Synthetic oligonucleotide
tagttcattttcaactagaa

SEQ ID NO: 503 - DNA, 20 bp, Artificial sequence
  Synthetic oligonucleotide
gtgggaatatttatatcata

SEQ ID NO: 504 - DNA, 20 bp, Artificial sequence
  Synthetic oligonucleotide
tctgcacacctaaacccctt

SEQ ID NO: 505 - DNA, 20 bp, Artificial sequence
  Synthetic oligonucleotide
tttgtatgatttcatccata

SEQ ID NO: 506 - DNA, 20 bp, Artificial sequence
  Synthetic oligonucleotide
ttccaactttctttcccacc

SEQ ID NO: 507 - DNA, 20 bp, Artificial sequence
  Synthetic oligonucleotide
agagttatttcttctacttg

SEQ ID NO: 508 - DNA, 20 bp, Artificial sequence
  Synthetic oligonucleotide
acctcactgtttacatctgt

SEQ ID NO: 509 - DNA, 20 bp, Artificial sequence
  Synthetic oligonucleotide
cacctggtgtccaaatgttc

SEQ ID NO: 510 - DNA, 20 bp, Artificial sequence
  Synthetic oligonucleotide
tgtaacaacaacaaccgccc

SEQ ID NO: 511 - DNA, 20 bp, Artificial sequence
  Synthetic oligonucleotide
ctcctaaaatacaaactggt

SEQ ID NO: 512 - DNA, 20 bp, Artificial sequence
  Synthetic oligonucleotide
cctttacattcttaaaggaa

SEQ ID NO: 513 - DNA, 20 bp, Artificial sequence
  Synthetic oligonucleotide
cttagatttccaatagaaaa

SEQ ID NO: 514 - DNA, 20 bp, Artificial sequence
  Synthetic oligonucleotide
cagaagattcttcaatggct

SEQ ID NO: 515 - DNA, 20 bp, Artificial sequence
  Synthetic oligonucleotide
aatgagtcaacctcatacca

SEQ ID NO: 516 - DNA, 20 bp, Artificial sequence
  Synthetic oligonucleotide
ggtctccccatcctcaattt

SEQ ID NO: 517 - DNA, 20 bp, Artificial sequence
  Synthetic oligonucleotide
attatttaatttctctctac

SEQ ID NO: 518 - DNA, 20 bp, Artificial sequence
  Synthetic oligonucleotide
ctcttctcttttctctattc

SEQ ID NO: 519 - DNA, 20 bp, Artificial sequence
  Synthetic oligonucleotide
ctaagaactatcaatatgct

SEQ ID NO: 520 - DNA, 20 bp, Artificial sequence
  Synthetic oligonucleotide
tcaagatataccctagctca

SEQ ID NO: 521 - DNA, 20 bp, Artificial sequence
  Synthetic oligonucleotide
tagttttcttaatctagagt

SEQ ID NO: 522 - DNA, 20 bp, Artificial sequence
  Synthetic oligonucleotide
ttggagcaccgatatagata

SEQ ID NO: 523 - DNA, 20 bp, Artificial sequence
  Synthetic oligonucleotide
atagataacaaaactgcctt

SEQ ID NO: 524 - DNA, 20 bp, Artificial sequence
  Synthetic oligonucleotide
ccactataaccaaatcagaa

SEQ ID NO: 525 - DNA, 20 bp, Artificial sequence
  Synthetic oligonucleotide
atgtgtatcactattgcctt

SEQ ID NO: 526 - DNA, 20 bp, Artificial sequence
  Synthetic oligonucleotide
aggttaactatcaccccaac

SEQ ID NO: 527 - DNA, 20 bp, Artificial sequence
  Synthetic oligonucleotide
caacaattatttctctaatt

SEQ ID NO: 528 - DNA, 20 bp, Artificial sequence
  Synthetic oligonucleotide
acttctgaaagactgagcaa

SEQ ID NO: 529 - DNA, 20 bp, Artificial sequence
  Synthetic oligonucleotide
tcttgctaacatcactctcc

SEQ ID NO: 530 - DNA, 20 bp, Artificial sequence
  Synthetic oligonucleotide
cttataaacatccttttgaa

SEQ ID NO: 531 - DNA, 20 bp, Artificial sequence
  Synthetic oligonucleotide
gaacagtttcctgattggtt

SEQ ID NO: 532 - DNA, 20 bp, Artificial sequence
  Synthetic oligonucleotide
ccttgttcataccttatctc

SEQ ID NO: 533 - DNA, 20 bp, Artificial sequence
  Synthetic oligonucleotide
cgtattttcccttctccaca

SEQ ID NO: 534 - DNA, 20 bp, Artificial sequence
  Synthetic oligonucleotide
tattagaatccatctatttt

SEQ ID NO: 535 - DNA, 20 bp, Artificial sequence
  Synthetic oligonucleotide
ccatatcaccacatcacaca

SEQ ID NO: 536 - DNA, 20 bp, Artificial sequence
  Synthetic oligonucleotide
aatggtttccaggattcctt

SEQ ID NO: 537 - DNA, 20 bp, Artificial sequence
  Synthetic oligonucleotide
ggatgatttatttattattt

SEQ ID NO: 538 - DNA, 20 bp, Artificial sequence
  Synthetic oligonucleotide
gcagttctcttttatcagct

SEQ ID NO: 539 - DNA, 20 bp, Artificial sequence
  Synthetic oligonucleotide
gaggtcagactctcccttcc

SEQ ID NO: 540 - DNA, 20 bp, Artificial sequence
  Synthetic oligonucleotide
ctgcaacccttataatttgt

SEQ ID NO: 541 - DNA, 20 bp, Artificial sequence
  Synthetic oligonucleotide
tctttccatctcttttctcc

SEQ ID NO: 542 - DNA, 20 bp, Artificial sequence
  Synthetic oligonucleotide
atcatcacaaataattgacc

SEQ ID NO: 543 - DNA, 20 bp, Artificial sequence
  Synthetic oligonucleotide
tttgccaaacagcaatgtaa

SEQ ID NO: 544 - DNA, 20 bp, Artificial sequence
  Synthetic oligonucleotide
gggtcttccccagaagccat

SEQ ID NO: 545 - DNA, 20 bp, Artificial sequence
  Synthetic oligonucleotide
ccattttttcacatacttgt

SEQ ID NO: 546 - DNA, 20 bp, Artificial sequence
  Synthetic oligonucleotide
gttcccttctatattcctcc

SEQ ID NO: 547 - DNA, 20 bp, Artificial sequence
  Synthetic oligonucleotide
actctttccatttcttcagt

SEQ ID NO: 548 - DNA, 20 bp, Artificial sequence
  Synthetic oligonucleotide
actttcctaaataaatttcc

SEQ ID NO: 549 - DNA, 20 bp, Artificial sequence
  Synthetic oligonucleotide
gttgataggataattacctc

SEQ ID NO: 550 - DNA, 20 bp, Artificial sequence
  Synthetic oligonucleotide
ttttgttaatatctgagtta

SEQ ID NO: 551 - DNA, 20 bp, Artificial sequence
  Synthetic oligonucleotide
atgaatagacttaccttccc

SEQ ID NO: 552 - DNA, 20 bp, Artificial sequence
  Synthetic oligonucleotide
ccttctccctcattttttct

SEQ ID NO: 553 - DNA, 20 bp, Artificial sequence
  Synthetic oligonucleotide
tgggaatatttatatcataa

SEQ ID NO: 554 - DNA, 20 bp, Artificial sequence
  Synthetic oligonucleotide
tcttcaagacactcatggta

SEQ ID NO: 555 - DNA, 20 bp, Artificial sequence
  Synthetic oligonucleotide
agatacccaaatcagtctct

SEQ ID NO: 556 - DNA, 20 bp, Artificial sequence
  Synthetic oligonucleotide
gcattcacaggaactcctta

SEQ ID NO: 557 - DNA, 20 bp, Artificial sequence
  Synthetic oligonucleotide
caagtactacaaaatggtga

SEQ ID NO: 558 - DNA, 20 bp, Artificial sequence
  Synthetic oligonucleotide
gtaacaacaacaaccgccca

SEQ ID NO: 559 - DNA, 20 bp, Artificial sequence
  Synthetic oligonucleotide
cttgttcataccttatctct

SEQ ID NO: 560 - DNA, 20 bp, Artificial sequence
  Synthetic oligonucleotide
cccagtgtaactcctgctga

SEQ ID NO: 561 - DNA, 20 bp, Artificial sequence
  Synthetic oligonucleotide
tttccaggattcctttttaa

SEQ ID NO: 562 - DNA, 20 bp, Artificial sequence
  Synthetic oligonucleotide
ttacccaaatcataattata

SEQ ID NO: 563 - DNA, 20 bp, Artificial sequence
  Synthetic oligonucleotide
catatcaccacatcacacat

SEQ ID NO: 564 - DNA, 20 bp, Artificial sequence
  Synthetic oligonucleotide
cccttctatattcctccttc

SEQ ID NO: 565 - DNA, 20 bp, Artificial sequence
  Synthetic oligonucleotide
aatcctttcctataacacaa

SEQ ID NO: 566 - DNA, 20 bp, Artificial sequence
  Synthetic oligonucleotide
taagaactatcaatatgcta

SEQ ID NO: 567 - DNA, 20 bp, Artificial sequence
  Synthetic oligonucleotide
tataattaaatcactgataa

SEQ ID NO: 568 - DNA, 20 bp, Artificial sequence
  Synthetic oligonucleotide
aacaattatttctctaatta

SEQ ID NO: 569 - DNA, 20 bp, Artificial sequence
  Synthetic oligonucleotide
ctttccatctcttttctccc

SEQ ID NO: 570 - DNA, 20 bp, Artificial sequence
  Synthetic oligonucleotide
ctccccatcctcaattttct

SEQ ID NO: 571 - DNA, 20 bp, Artificial sequence
  Synthetic oligonucleotide
cagttctcttttatcagctt

SEQ ID NO: 572 - DNA, 20 bp, Artificial sequence
  Synthetic oligonucleotide
caagtaacatttattttgct

SEQ ID NO: 573 - DNA, 20 bp, Artificial sequence
  Synthetic oligonucleotide
ttgccattcccccatgcatc

SEQ ID NO: 574 - DNA, 20 bp, Artificial sequence
  Synthetic oligonucleotide
acttttattatgtctagcta

SEQ ID NO: 575 - DNA, 20 bp, Artificial sequence
  Synthetic oligonucleotide
tgacaagtcacttctctgtc

SEQ ID NO: 576 - DNA, 20 bp, Artificial sequence
  Synthetic oligonucleotide
gttaaagaatttaccagcct

SEQ ID NO: 577 - DNA, 20 bp, Artificial sequence
  Synthetic oligonucleotide
acatatgcacataaatgcat

SEQ ID NO: 578 - DNA, 20 bp, Artificial sequence
  Synthetic oligonucleotide
gaatagacttaccttcccta

SEQ ID NO: 579 - DNA, 20 bp, Artificial sequence
  Synthetic oligonucleotide
gctgtctaccaccctcatcc

SEQ ID NO: 580 - DNA, 20 bp, Artificial sequence
  Synthetic oligonucleotide
agagagttttatacttttcc

SEQ ID NO: 581 - DNA, 20 bp, Artificial sequence
  Synthetic oligonucleotide
tgcaacccttataatttgta

SEQ ID NO: 582 - DNA, 20 bp, Artificial sequence
  Synthetic oligonucleotide
gtatgatttcatccatagaa

SEQ ID NO: 583 - DNA, 20 bp, Artificial sequence
  Synthetic oligonucleotide
gtattttcccttctccacat

SEQ ID NO: 584 - DNA, 20 bp, Artificial sequence
  Synthetic oligonucleotide
gcctcttaccttttctcctc

SEQ ID NO: 585 - DNA, 20 bp, Artificial sequence
  Synthetic oligonucleotide
cctaaaatacaaactggttt

SEQ ID NO: 586 - DNA, 20 bp, Artificial sequence
  Synthetic oligonucleotide
gttatttcttctacttgagc

SEQ ID NO: 587 - DNA, 20 bp, Artificial sequence
  Synthetic oligonucleotide
tctttccatttcttcagtgc

SEQ ID NO: 588 - DNA, 20 bp, Artificial sequence
  Synthetic oligonucleotide
ctttcctaaataaatttcct

SEQ ID NO: 589 - DNA, 20 bp, Artificial sequence
  Synthetic oligonucleotide
ctgcacacctaaacccctta

SEQ ID NO: 590 - DNA, 20 bp, Artificial sequence
  Synthetic oligonucleotide
attagaatccatctatttta

SEQ ID NO: 591 - DNA, 20 bp, Artificial sequence
  Synthetic oligonucleotide
acatcaaaccaaacatgagt

SEQ ID NO: 592 - DNA, 20 bp, Artificial sequence
  Synthetic oligonucleotide
gatgatttatttattatttg

SEQ ID NO: 593 - DNA, 20 bp, Artificial sequence
  Synthetic oligonucleotide
gttaactatcaccccaacac

SEQ ID NO: 594 - DNA, 20 bp, Artificial sequence
  Synthetic oligonucleotide
tgtagtatttacaatatctt

SEQ ID NO: 595 - DNA, 20 bp, Artificial sequence
  Synthetic oligonucleotide
tcccagacattcctttccat

SEQ ID NO: 596 - DNA, 20 bp, Artificial sequence
  Synthetic oligonucleotide
tgcactgtcccctctgtcta

SEQ ID NO: 597 - DNA, 20 bp, Artificial sequence
  Synthetic oligonucleotide
tcccaaggaactatccagcc

SEQ ID NO: 598 - DNA, 20 bp, Artificial sequence
  Synthetic oligonucleotide
atgagtcaacctcataccat

SEQ ID NO: 599 - DNA, 20 bp, Artificial sequence
  Synthetic oligonucleotide
ttcattttcaactagaagcc

SEQ ID NO: 600 - DNA, 20 bp, Artificial sequence
  Synthetic oligonucleotide
gaagattcttcaatggctgt

SEQ ID NO: 601 - DNA, 20 bp, Artificial sequence
  Synthetic oligonucleotide
aacagcaatgtaaccaatca

SEQ ID NO: 602 - DNA, 20 bp, Artificial sequence
  Synthetic oligonucleotide
actgtatgttttcttttgaa

SEQ ID NO: 603 - DNA, 20 bp, Artificial sequence
  Synthetic oligonucleotide
tcatcacaaataattgacca

SEQ ID NO: 604 - DNA, 20 bp, Artificial sequence
  Synthetic oligonucleotide
gataggataattacctcttc

SEQ ID NO: 605 - DNA, 20 bp, Artificial sequence
  Synthetic oligonucleotide
catacaaattcactaagtac

SEQ ID NO: 606 - DNA, 20 bp, Artificial sequence
  Synthetic oligonucleotide
ctcactgtttacatctgtct

SEQ ID NO: 607 - DNA, 20 bp, Artificial sequence
  Synthetic oligonucleotide
tgtgtatcactattgcctta

SEQ ID NO: 608 - DNA, 20 bp, Artificial sequence
  Synthetic oligonucleotide
atttaatttctctctacctg

SEQ ID NO: 609 - DNA, 20 bp, Artificial sequence
  Synthetic oligonucleotide
tctgagttaatcacattttt

SEQ ID NO: 610 - DNA, 20 bp, Artificial sequence
  Synthetic oligonucleotide
cactataaccaaatcagaaa

SEQ ID NO: 611 - DNA, 20 bp, Artificial sequence
  Synthetic oligonucleotide
ttctccctcattttttctgt

SEQ ID NO: 612 - DNA, 20 bp, Artificial sequence
  Synthetic oligonucleotide
agcgacctttttcctaggga

SEQ ID NO: 613 - DNA, 20 bp, Artificial sequence
  Synthetic oligonucleotide
gttaagatggcaactacaat

SEQ ID NO: 614 - DNA, 20 bp, Artificial sequence
  Synthetic oligonucleotide
aaagactgagcaacattaca

SEQ ID NO: 615 - DNA, 20 bp, Artificial sequence
  Synthetic oligonucleotide
ctggtttccttatctctctt

SEQ ID NO: 616 - DNA, 20 bp, Artificial sequence
  Synthetic oligonucleotide
ttctgctactctagaaggac

SEQ ID NO: 617 - DNA, 20 bp, Artificial sequence
  Synthetic oligonucleotide
gcaccgatatagatatggaa

SEQ ID NO: 618 - DNA, 20 bp, Artificial sequence
  Synthetic oligonucleotide
ataaacatccttttgaaaaa

SEQ ID NO: 619 - DNA, 20 bp, Artificial sequence
  Synthetic oligonucleotide
ggagcatttttagagtggta

SEQ ID NO: 620 - DNA, 20 bp, Artificial sequence
  Synthetic oligonucleotide
tttttcctaatccttccccc

SEQ ID NO: 621 - DNA, 20 bp, Artificial sequence
  Synthetic oligonucleotide
tcttctcttttctctattca

SEQ ID NO: 622 - DNA, 20 bp, Artificial sequence
  Synthetic oligonucleotide
ctttacattcttaaaggaat

SEQ ID NO: 623 - DNA, 20 bp, Artificial sequence
  Synthetic oligonucleotide
agcatatgaaatacttcatt

SEQ ID NO: 624 - DNA, 20 bp, Artificial sequence
  Synthetic oligonucleotide
cttgctaacatcactctccc

SEQ ID NO: 625 - DNA, 20 bp, Artificial sequence
  Synthetic oligonucleotide
aagtaatttaaaactaagtt

SEQ ID NO: 626 - DNA, 20 bp, Artificial sequence
  Synthetic oligonucleotide
tagataacaaaactgcctta

SEQ ID NO: 627 - DNA, 20 bp, Artificial sequence
  Synthetic oligonucleotide
gtcagactctcccttcctga

SEQ ID NO: 628 - DNA, 20 bp, Artificial sequence
  Synthetic oligonucleotide
caactttctttcccaccgaa

SEQ ID NO: 629 - DNA, 20 bp, Artificial sequence
  Synthetic oligonucleotide
agttttcttaatctagagtc

SEQ ID NO: 630 - DNA, 20 bp, Artificial sequence
  Synthetic oligonucleotide
ctctcccttcctgatggcct

SEQ ID NO: 631 - DNA, 20 bp, Artificial sequence
  Synthetic oligonucleotide
gctaatgtcctattaacatt

SEQ ID NO: 632 - DNA, 20 bp, Artificial sequence
  Synthetic oligonucleotide
tatatcataaaaatcagcaa

SEQ ID NO: 633 - DNA, 20 bp, Artificial sequence
  Synthetic oligonucleotide
tatgatttcatccatagaat

SEQ ID NO: 634 - DNA, 20 bp, Artificial sequence
  Synthetic oligonucleotide
ttcctttccattgatttcaa

SEQ ID NO: 635 - DNA, 20 bp, Artificial sequence
  Synthetic oligonucleotide
agcaatgtaaccaatcacat

SEQ ID NO: 636 - DNA, 20 bp, Artificial sequence
  Synthetic oligonucleotide
tttcaaggtttcctctgccc

SEQ ID NO: 637 - DNA, 20 bp, Artificial sequence
  Synthetic oligonucleotide
acatctgtctttcctacttc

SEQ ID NO: 638 - DNA, 20 bp, Artificial sequence
  Synthetic oligonucleotide
ttttaaaaattttaatgctt

SEQ ID NO: 639 - DNA, 20 bp, Artificial sequence
  Synthetic oligonucleotide
tgcaagtttttcataaacaa

SEQ ID NO: 640 - DNA, 20 bp, Artificial sequence
  Synthetic oligonucleotide
ctgacggtatatattatctt

SEQ ID NO: 641 - DNA, 20 bp, Artificial sequence
  Synthetic oligonucleotide
ttaactatcaccccaacaca

SEQ ID NO: 642 - DNA, 20 bp, Artificial sequence
  Synthetic oligonucleotide
aagatggcaactacaattta

SEQ ID NO: 643 - DNA, 20 bp, Artificial sequence
  Synthetic oligonucleotide
ttgttcataccttatctctt

SEQ ID NO: 644 - DNA, 20 bp, Artificial sequence
  Synthetic oligonucleotide
tttctctaattagatagtta

SEQ ID NO: 645 - DNA, 20 bp, Artificial sequence
  Synthetic oligonucleotide
ttgctaacatcactctccca

SEQ ID NO: 646 - DNA, 20 bp, Artificial sequence
  Synthetic oligonucleotide
atcgagaatcccaaacagcc

SEQ ID NO: 647 - DNA, 20 bp, Artificial sequence
  Synthetic oligonucleotide
ataggatactacatcagctc

SEQ ID NO: 648 - DNA, 20 bp, Artificial sequence
  Synthetic oligonucleotide
gacaagtcacttctctgtct

SEQ ID NO: 649 - DNA, 20 bp, Artificial sequence
  Synthetic oligonucleotide
ctataaccaaatcagaaagt

SEQ ID NO: 650 - DNA, 20 bp, Artificial sequence
  Synthetic oligonucleotide
caggaactccttaaatatca

SEQ ID NO: 651 - DNA, 20 bp, Artificial sequence
  Synthetic oligonucleotide
agcaatgaccaatcaagagc

SEQ ID NO: 652 - DNA, 20 bp, Artificial sequence
  Synthetic oligonucleotide
gcatatgaaatacttcattc

SEQ ID NO: 653 - DNA, 20 bp, Artificial sequence
  Synthetic oligonucleotide
ccttctatattcctccttct

SEQ ID NO: 654 - DNA, 20 bp, Artificial sequence
  Synthetic oligonucleotide
gtatttacaatatcttgtgc

SEQ ID NO: 655 - DNA, 20 bp, Artificial sequence
  Synthetic oligonucleotide
atatcaccacatcacacatc

SEQ ID NO: 656 - DNA, 20 bp, Artificial sequence
  Synthetic oligonucleotide
gttttgttttctcacataca

SEQ ID NO: 657 - DNA, 20 bp, Artificial sequence
  Synthetic oligonucleotide
tacaaattcactaagtacaa

SEQ ID NO: 658 - DNA, 20 bp, Artificial sequence
  Synthetic oligonucleotide
aagtaacatttattttgctt

SEQ ID NO: 659 - DNA, 20 bp, Artificial sequence
  Synthetic oligonucleotide
tcattttcaactagaagcca

SEQ ID NO: 660 - DNA, 20 bp, Artificial sequence
  Synthetic oligonucleotide
tggaatgaatcactaaggga

SEQ ID NO: 661 - DNA, 20 bp, Artificial sequence
  Synthetic oligonucleotide
attttcccttctccacatcc

SEQ ID NO: 662 - DNA, 20 bp, Artificial sequence
  Synthetic oligonucleotide
gtatgaagaatttcagcaaa

SEQ ID NO: 663 - DNA, 20 bp, Artificial sequence
  Synthetic oligonucleotide
ctcttaccttttctcctctt

SEQ ID NO: 664 - DNA, 20 bp, Artificial sequence
  Synthetic oligonucleotide
caagcagtgcctctgagccc

SEQ ID NO: 665 - DNA, 20 bp, Artificial sequence
  Synthetic oligonucleotide
catatgcacataaatgcatt

SEQ ID NO: 666 - DNA, 20 bp, Artificial sequence
  Synthetic oligonucleotide
ttctgtttctttccagtttc

SEQ ID NO: 667 - DNA, 20 bp, Artificial sequence
  Synthetic oligonucleotide
gtctctattattttctggat

SEQ ID NO: 668 - DNA, 20 bp, Artificial sequence
  Synthetic oligonucleotide
tttaatttctctctacctga

SEQ ID NO: 669 - DNA, 20 bp, Artificial sequence
  Synthetic oligonucleotide
ctagaaggacatcctcccca

SEQ ID NO: 670 - DNA, 20 bp, Artificial sequence
  Synthetic oligonucleotide
cttctcttttctctattcat

SEQ ID NO: 671 - DNA, 20 bp, Artificial sequence
  Synthetic oligonucleotide
tacccaaatcataattataa

SEQ ID NO: 672 - DNA, 20 bp, Artificial sequence
  Synthetic oligonucleotide
ctttctttcccaccgaagta

SEQ ID NO: 673 - DNA, 20 bp, Artificial sequence
  Synthetic oligonucleotide
ttccatctcttttctcccca

SEQ ID NO: 674 - DNA, 20 bp, Artificial sequence
  Synthetic oligonucleotide
ttttcctaatccttccccca

SEQ ID NO: 675 - DNA, 20 bp, Artificial sequence
  Synthetic oligonucleotide
gtctaccaccctcatcccca

SEQ ID NO: 676 - DNA, 20 bp, Artificial sequence
  Synthetic oligonucleotide
tttccatttcttcagtgctt

SEQ ID NO: 677 - DNA, 20 bp, Artificial sequence
  Synthetic oligonucleotide
actattgccttatcttcagc

SEQ ID NO: 678 - DNA, 20 bp, Artificial sequence
  Synthetic oligonucleotide
gttttcttaatctagagtcc

SEQ ID NO: 679 - DNA, 20 bp, Artificial sequence
  Synthetic oligonucleotide
gctgctgcaaatatcacggc

SEQ ID NO: 680 - DNA, 20 bp, Artificial sequence
  Synthetic oligonucleotide
tctattcctatcttttgcct

SEQ ID NO: 681 - DNA, 20 bp, Artificial sequence
  Synthetic oligonucleotide
ttccaggattcctttttaaa

SEQ ID NO: 682 - DNA, 20 bp, Artificial sequence
  Synthetic oligonucleotide
gcgacctttttcctagggaa

SEQ ID NO: 683 - DNA, 20 bp, Artificial sequence
  Synthetic oligonucleotide
ctagtgccctttcatttcac

SEQ ID NO: 684 - DNA, 20 bp, Artificial sequence
  Synthetic oligonucleotide
ccatcctcaattttctgttt

SEQ ID NO: 685 - DNA, 20 bp, Artificial sequence
  Synthetic oligonucleotide
aagaactatcaatatgctaa

SEQ ID NO: 686 - DNA, 20 bp, Artificial sequence
  Synthetic oligonucleotide
cccaaggaactatccagccc

SEQ ID NO: 687 - DNA, 20 bp, Artificial sequence
  Synthetic oligonucleotide
gttcagagaaatactaattt

SEQ ID NO: 688 - DNA, 20 bp, Artificial sequence
  Synthetic oligonucleotide
tttcctaaataaatttccta

SEQ ID NO: 689 - DNA, 20 bp, Artificial sequence
  Synthetic oligonucleotide
ccagtgtaactcctgctgaa

SEQ ID NO: 690 - DNA, 20 bp, Artificial sequence
  Synthetic oligonucleotide
gagtcaacctcataccatga

SEQ ID NO: 691 - DNA, 20 bp, Artificial sequence
  Synthetic oligonucleotide
gcaacccttataatttgtat

SEQ ID NO: 692 - DNA, 20 bp, Artificial sequence
  Synthetic oligonucleotide
taggataattacctcttcca

SEQ ID NO: 693 - DNA, 20 bp, Artificial sequence
  Synthetic oligonucleotide
ttagttgttatgattaccac

SEQ ID NO: 694 - DNA, 20 bp, Artificial sequence
  Synthetic oligonucleotide
atgtaatttcttaaattggg

SEQ ID NO: 695 - DNA, 20 bp, Artificial sequence
  Synthetic oligonucleotide
tcactgataaaatttagtca

SEQ ID NO: 696 - DNA, 20 bp, Artificial sequence
  Synthetic oligonucleotide
tggtttttaaagaaaaacca

SEQ ID NO: 697 - DNA, 20 bp, Artificial sequence
  Synthetic oligonucleotide
cagtggctcacaaaacgatt

SEQ ID NO: 698 - DNA, 20 bp, Artificial sequence
  Synthetic oligonucleotide
ttcaagacactcatggtatc

SEQ ID NO: 699 - DNA, 20 bp, Artificial sequence
  Synthetic oligonucleotide
gagagttttatacttttcca

SEQ ID NO: 700 - DNA, 20 bp, Artificial sequence
  Synthetic oligonucleotide
ctgagttaatcacatttttt

SEQ ID NO: 701 - DNA, 20 bp, Artificial sequence
  Synthetic oligonucleotide
gatttatttattatttgtgt

SEQ ID NO: 702 - DNA, 20 bp, Artificial sequence
  Synthetic oligonucleotide
tggtttccttatctctcttt

SEQ ID NO: 703 - DNA, 20 bp, Artificial sequence
  Synthetic oligonucleotide
tcttatggtttaactccttt

SEQ ID NO: 704 - DNA, 20 bp, Artificial sequence
  Synthetic oligonucleotide
tcctttcctataacacaaat

SEQ ID NO: 705 - DNA, 20 bp, Artificial sequence
  Synthetic oligonucleotide
agactgagcaacattacaat

SEQ ID NO: 706 - DNA, 20 bp, Artificial sequence
  Synthetic oligonucleotide
ttagaatccatctattttac

SEQ ID NO: 707 - DNA, 20 bp, Artificial sequence
  Synthetic oligonucleotide
aggataattacctcttccaa

SEQ ID NO: 708 - DNA, 20 bp, Artificial sequence
  Synthetic oligonucleotide
tccttatctctctttagtgt

SEQ ID NO: 709 - DNA, 20 bp, Artificial sequence
  Synthetic oligonucleotide
gaagtgttttctttttctgc

SEQ ID NO: 710 - DNA, 20 bp, Artificial sequence
  Synthetic oligonucleotide
tagaaggacatcctccccac

SEQ ID NO: 711 - DNA, 20 bp, Artificial sequence
  Synthetic oligonucleotide
cactgataaaatttagtcac

SEQ ID NO: 712 - DNA, 20 bp, Artificial sequence
  Synthetic oligonucleotide
ccattactaaaaattaagtt

SEQ ID NO: 713 - DNA, 20 bp, Artificial sequence
  Synthetic oligonucleotide
tgtcctattaacattttagc

SEQ ID NO: 714 - DNA, 20 bp, Artificial sequence
  Synthetic oligonucleotide
tagtttctcactcacaagtc

SEQ ID NO: 715 - DNA, 20 bp, Artificial sequence
  Synthetic oligonucleotide
tagtgccctttcatttcacc

SEQ ID NO: 716 - DNA, 20 bp, Artificial sequence
  Synthetic oligonucleotide
tcttaccttttctcctcttt

SEQ ID NO: 717 - DNA, 20 bp, Artificial sequence
  Synthetic oligonucleotide
agagttttatacttttccat

SEQ ID NO: 718 - DNA, 20 bp, Artificial sequence
  Synthetic oligonucleotide
tttatttattatttgtgtcc

SEQ ID NO: 719 - DNA, 20 bp, Artificial sequence
  Synthetic oligonucleotide
gatggcaactacaatttatt

SEQ ID NO: 720 - DNA, 20 bp, Artificial sequence
  Synthetic oligonucleotide
gctaacatcactctcccaga

SEQ ID NO: 721 - DNA, 20 bp, Artificial sequence
  Synthetic oligonucleotide
tcatccccaattttttgctt

SEQ ID NO: 722 - DNA, 20 bp, Artificial sequence
  Synthetic oligonucleotide
ttcctaatccttcccccatc

SEQ ID NO: 723 - DNA, 20 bp, Artificial sequence
  Synthetic oligonucleotide
ggtatatattatctttgtca

SEQ ID NO: 724 - DNA, 20 bp, Artificial sequence
  Synthetic oligonucleotide
atccatagaatatactttct

SEQ ID NO: 725 - DNA, 20 bp, Artificial sequence
  Synthetic oligonucleotide
cttctgacttttcctttcct

SEQ ID NO: 726 - DNA, 20 bp, Artificial sequence
  Synthetic oligonucleotide
ataaccaaatcagaaagtta

SEQ ID NO: 727 - DNA, 20 bp, Artificial sequence
  Synthetic oligonucleotide
ctgctgcaaatatcacggcc

SEQ ID NO: 728 - DNA, 20 bp, Artificial sequence
  Synthetic oligonucleotide
ggaactccttaaatatcata

SEQ ID NO: 729 - DNA, 20 bp, Artificial sequence
  Synthetic oligonucleotide
tatttacaatatcttgtgca

SEQ ID NO: 730 - DNA, 20 bp, Artificial sequence
  Synthetic oligonucleotide
tccatctcttttctccccat

SEQ ID NO: 731 - DNA, 20 bp, Artificial sequence
  Synthetic oligonucleotide
tgagttaatcacattttttt

SEQ ID NO: 732 - DNA, 20 bp, Artificial sequence
  Synthetic oligonucleotide
agtaacatttattttgctta

SEQ ID NO: 733 - DNA, 20 bp, Artificial sequence
  Synthetic oligonucleotide
gcaagtttttcataaacaaa

SEQ ID NO: 734 - DNA, 20 bp, Artificial sequence
  Synthetic oligonucleotide
gcacataaatgcatttgcat

SEQ ID NO: 735 - DNA, 20 bp, Artificial sequence
  Synthetic oligonucleotide
tatcaccacatcacacatca

SEQ ID NO: 736 - DNA, 20 bp, Artificial sequence
  Synthetic oligonucleotide
agaattgcatttactaggct

SEQ ID NO: 737 - DNA, 20 bp, Artificial sequence
  Synthetic oligonucleotide
tgtaatttcttaaattgggt

SEQ ID NO: 738 - DNA, 20 bp, Artificial sequence
  Synthetic oligonucleotide
ggattcctttttaaaaaggc

SEQ ID NO: 739 - DNA, 20 bp, Artificial sequence
  Synthetic oligonucleotide
ttcaaggtttcctctgccct

SEQ ID NO: 740 - DNA, 20 bp, Artificial sequence
  Synthetic oligonucleotide
acaagtcacttctctgtctt

SEQ ID NO: 741 - DNA, 20 bp, Artificial sequence
  Synthetic oligonucleotide
ttctatattcctccttctgc

SEQ ID NO: 742 - DNA, 20 bp, Artificial sequence
  Synthetic oligonucleotide
ttccattgatttcaaccaat

SEQ ID NO: 743 - DNA, 20 bp, Artificial sequence
  Synthetic oligonucleotide
gaaatacttcattcttggcc

SEQ ID NO: 744 - DNA, 20 bp, Artificial sequence
  Synthetic oligonucleotide
gcaatgaccaatcaagagca

SEQ ID NO: 745 - DNA, 20 bp, Artificial sequence
  Synthetic oligonucleotide
ttctcttttctctattcatc

SEQ ID NO: 746 - DNA, 20 bp, Artificial sequence
  Synthetic oligonucleotide
ttctgtttcatacttggagt

SEQ ID NO: 747 - DNA, 20 bp, Artificial sequence
  Synthetic oligonucleotide
ccaaggaactatccagccca

SEQ ID NO: 748 - DNA, 20 bp, Artificial sequence
  Synthetic oligonucleotide
aaataaatttcctaagggcc

SEQ ID NO: 749 - DNA, 20 bp, Artificial sequence
  Synthetic oligonucleotide
taggatactacatcagctca

SEQ ID NO: 750 - DNA, 20 bp, Artificial sequence
  Synthetic oligonucleotide
atagtttctttatacaagta

SEQ ID NO: 751 - DNA, 20 bp, Artificial sequence
  Synthetic oligonucleotide
acaaattcactaagtacaaa

SEQ ID NO: 752 - DNA, 20 bp, Artificial sequence
  Synthetic oligonucleotide
agggaagcattcttcttcta

SEQ ID NO: 753 - DNA, 20 bp, Artificial sequence
  Synthetic oligonucleotide
tactaatttaaaaaaaggga

SEQ ID NO: 754 - DNA, 20 bp, Artificial sequence
  Synthetic oligonucleotide
tgctttgtacaatatggtaa

SEQ ID NO: 755 - DNA, 20 bp, Artificial sequence
  Synthetic oligonucleotide
tctctattattttctggata

SEQ ID NO: 756 - DNA, 20 bp, Artificial sequence
  Synthetic oligonucleotide
tgctgaaaaaccttatactt

SEQ ID NO: 757 - DNA, 20 bp, Artificial sequence
  Synthetic oligonucleotide
aaagcacacatttttactca

SEQ ID NO: 758 - DNA, 20 bp, Artificial sequence
  Synthetic oligonucleotide
tgggtagtaacaacagcagc

SEQ ID NO: 759 - DNA, 20 bp, Artificial sequence
  Synthetic oligonucleotide
gttgttatgattaccaccac

SEQ ID NO: 760 - DNA, 20 bp, Artificial sequence
  Synthetic oligonucleotide
gactgagcaacattacaatc

SEQ ID NO: 761 - DNA, 20 bp, Artificial sequence
  Synthetic oligonucleotide
tagatagttacctattttct

SEQ ID NO: 762 - DNA, 20 bp, Artificial sequence
  Synthetic oligonucleotide
tggtatcttaaaatacagat

SEQ ID NO: 763 - DNA, 20 bp, Artificial sequence
  Synthetic oligonucleotide
tctccacatcctacaagggc

SEQ ID NO: 764 - DNA, 20 bp, Artificial sequence
  Synthetic oligonucleotide
tttctttcccaccgaagtat

SEQ ID NO: 765 - DNA, 20 bp, Artificial sequence
  Synthetic oligonucleotide
taatttctctctacctgatt

SEQ ID NO: 766 - DNA, 20 bp, Artificial sequence
  Synthetic oligonucleotide
ttgtaaagaaataatgttca

SEQ ID NO: 767 - DNA, 20 bp, Artificial sequence
  Synthetic oligonucleotide
catctgtctttcctacttca

SEQ ID NO: 768 - DNA, 20 bp, Artificial sequence
  Synthetic oligonucleotide
taactatcaccccaacacaa

SEQ ID NO: 769 - DNA, 20 bp, Artificial sequence
  Synthetic oligonucleotide
gcaatgtaaccaatcacata

SEQ ID NO: 770 - DNA, 20 bp, Artificial sequence
  Synthetic oligonucleotide
cgagaatcccaaacagccat

SEQ ID NO: 771 - DNA, 20 bp, Artificial sequence
  Synthetic oligonucleotide
tttaaaaattttaatgctta

SEQ ID NO: 772 - DNA, 20 bp, Artificial sequence
  Synthetic oligonucleotide
ttcataccttatctctttcc

SEQ ID NO: 773 - DNA, 20 bp, Artificial sequence
  Synthetic oligonucleotide
tttgtataccactctttagt

SEQ ID NO: 774 - DNA, 20 bp, Artificial sequence
  Synthetic oligonucleotide
cctttcctataacacaaata

SEQ ID NO: 775 - DNA, 20 bp, Artificial sequence
  Synthetic oligonucleotide
atatcataaaaatcagcaaa

SEQ ID NO: 776 - DNA, 20 bp, Artificial sequence
  Synthetic oligonucleotide
tagaatccatctattttaca

SEQ ID NO: 777 - DNA, 20 bp, Artificial sequence
  Synthetic oligonucleotide
acccaaatcataattataac

SEQ ID NO: 778 - DNA, 20 bp, Artificial sequence
  Synthetic oligonucleotide
atatgctaattttcaggcgg

SEQ ID NO: 779 - DNA, 20 bp, Artificial sequence
  Synthetic oligonucleotide
cctgatggcctctaagaagt

SEQ ID NO: 780 - DNA, 20 bp, Artificial sequence
  Synthetic oligonucleotide
ggacctctcccaactttctt

SEQ ID NO: 781 - DNA, 20 bp, Artificial sequence
  Synthetic oligonucleotide
atggtttaactcctttgctc

SEQ ID NO: 782 - DNA, 20 bp, Artificial sequence
  Synthetic oligonucleotide
ttgttttctcacatacagcg

SEQ ID NO: 783 - DNA, 20 bp, Artificial sequence
  Synthetic oligonucleotide
ctattgccttatcttcagct

SEQ ID NO: 784 - DNA, 20 bp, Artificial sequence
  Synthetic oligonucleotide
ggtaagtacccaaaagaagc

SEQ ID NO: 785 - DNA, 20 bp, Artificial sequence
  Synthetic oligonucleotide
cttaccttttctcctctttc

SEQ ID NO: 786 - DNA, 20 bp, Artificial sequence
  Synthetic oligonucleotide
ccgtataccacttcagctta

SEQ ID NO: 787 - DNA, 20 bp, Artificial sequence
  Synthetic oligonucleotide
attcctttttaaaaaggcgc

SEQ ID NO: 788 - DNA, 20 bp, Artificial sequence
  Synthetic oligonucleotide
gtgcagaatattataattct

SEQ ID NO: 789 - DNA, 20 bp, Artificial sequence
  Synthetic oligonucleotide
tccatctattttacaagtga

SEQ ID NO: 790 - DNA, 20 bp, Artificial sequence
  Synthetic oligonucleotide
ttgtataccactctttagtc

SEQ ID NO: 791 - DNA, 20 bp, Artificial sequence
  Synthetic oligonucleotide
cgtcactaaaaacactgctt

SEQ ID NO: 792 - DNA, 20 bp, Artificial sequence
  Synthetic oligonucleotide
tctatattcctccttctgcc

SEQ ID NO: 793 - DNA, 20 bp, Artificial sequence
  Synthetic oligonucleotide
gctgaaaaaccttatacttg

SEQ ID NO: 794 - DNA, 20 bp, Artificial sequence
  Synthetic oligonucleotide
tcttttctctattcatctcc

SEQ ID NO: 795 - DNA, 20 bp, Artificial sequence
  Synthetic oligonucleotide
tggttctttaaaaaagtata

SEQ ID NO: 796 - DNA, 20 bp, Artificial sequence
  Synthetic oligonucleotide
catttgcattctaccagtca

SEQ ID NO: 797 - DNA, 20 bp, Artificial sequence
  Synthetic oligonucleotide
ttttatacttttccatgttt

SEQ ID NO: 798 - DNA, 20 bp, Artificial sequence
  Synthetic oligonucleotide
ccttatctctctttagtgtc

SEQ ID NO: 799 - DNA, 20 bp, Artificial sequence
  Synthetic oligonucleotide
ttgttatgattaccaccact

SEQ ID NO: 800 - DNA, 20 bp, Artificial sequence
  Synthetic oligonucleotide
tggtttaactcctttgctcc

SEQ ID NO: 801 - DNA, 20 bp, Artificial sequence
  Synthetic oligonucleotide
ggtgtgtttctttttgccca

SEQ ID NO: 802 - DNA, 20 bp, Artificial sequence
  Synthetic oligonucleotide
tccatagaatatactttcta

SEQ ID NO: 803 - DNA, 20 bp, Artificial sequence
  Synthetic oligonucleotide
gaactccttaaatatcataa

SEQ ID NO: 804 - DNA, 20 bp, Artificial sequence
  Synthetic oligonucleotide
ccatctcttttctccccata

SEQ ID NO: 805 - DNA, 20 bp, Artificial sequence
  Synthetic oligonucleotide
aaactgttttacatctaatc

SEQ ID NO: 806 - DNA, 20 bp, Artificial sequence
  Synthetic oligonucleotide
agtccccaactactatcata

SEQ ID NO: 807 - DNA, 20 bp, Artificial sequence
  Synthetic oligonucleotide
tatcataaaaatcagcaaac

SEQ ID NO: 808 - DNA, 20 bp, Artificial sequence
  Synthetic oligonucleotide
acaattttaaaaacttgcac

SEQ ID NO: 809 - DNA, 20 bp, Artificial sequence
  Synthetic oligonucleotide
gtttctttatacaagtaaca

SEQ ID NO: 810 - DNA, 20 bp, Artificial sequence
  Synthetic oligonucleotide
gtttctcactcacaagtcta

SEQ ID NO: 811 - DNA, 20 bp, Artificial sequence
  Synthetic oligonucleotide
agtgttttctttttctgctc

SEQ ID NO: 812 - DNA, 20 bp, Artificial sequence
  Synthetic oligonucleotide
ggtatcttaaaatacagatt

SEQ ID NO: 813 - DNA, 20 bp, Artificial sequence
  Synthetic oligonucleotide
aatttagtcacctcaagaaa

SEQ ID NO: 814 - DNA, 20 bp, Artificial sequence
  Synthetic oligonucleotide
aagcacacatttttactcaa

SEQ ID NO: 815 - DNA, 20 bp, Artificial sequence
  Synthetic oligonucleotide
acttggagtctctaaaactt

SEQ ID NO: 816 - DNA, 20 bp, Artificial sequence
  Synthetic oligonucleotide
atcaaacacattttctgttc

SEQ ID NO: 817 - DNA, 20 bp, Artificial sequence
  Synthetic oligonucleotide
ggataattacctcttccaaa

SEQ ID NO: 818 - DNA, 20 bp, Artificial sequence
  Synthetic oligonucleotide
tggcaactacaatttattga

SEQ ID NO: 819 - DNA, 20 bp, Artificial sequence
  Synthetic oligonucleotide
tcaaagaaattactatggga

SEQ ID NO: 820 - DNA, 20 bp, Artificial sequence
  Synthetic oligonucleotide
cattactaaaaattaagtta

SEQ ID NO: 821 - DNA, 20 bp, Artificial sequence
  Synthetic oligonucleotide
gcaggtgtgatcatacaaca

SEQ ID NO: 822 - DNA, 20 bp, Artificial sequence
  Synthetic oligonucleotide
acaatgtttttaacatatat

SEQ ID NO: 823 - DNA, 20 bp, Artificial sequence
  Synthetic oligonucleotide
aagtgagccaccatgagctc

SEQ ID NO: 824 - DNA, 20 bp, Artificial sequence
  Synthetic oligonucleotide
tgctaattttcaggcggtta

SEQ ID NO: 825 - DNA, 20 bp, Artificial sequence
  Synthetic oligonucleotide
gtaatttcttaaattgggtt

SEQ ID NO: 826 - DNA, 20 bp, Artificial sequence
  Synthetic oligonucleotide
atcaccacatcacacatcaa

SEQ ID NO: 827 - DNA, 20 bp, Artificial sequence
  Synthetic oligonucleotide
tcaaggtttcctctgccctc

SEQ ID NO: 828 - DNA, 20 bp, Artificial sequence
  Synthetic oligonucleotide
gtcctattaacattttagca

SEQ ID NO: 829 - DNA, 20 bp, Artificial sequence
  Synthetic oligonucleotide
tgtttgtcaacccttttttc

SEQ ID NO: 830 - DNA, 20 bp, Artificial sequence
  Synthetic oligonucleotide
actgagcaacattacaatct

SEQ ID NO: 831 - DNA, 20 bp, Artificial sequence
  Synthetic oligonucleotide
agggaagcttaaaaacacaa

SEQ ID NO: 832 - DNA, 20 bp, Artificial sequence
  Synthetic oligonucleotide
agatagttacctattttcta

SEQ ID NO: 833 - DNA, 20 bp, Artificial sequence
  Synthetic oligonucleotide
actatcaccccaacacaaaa

SEQ ID NO: 834 - DNA, 20 bp, Artificial sequence
  Synthetic oligonucleotide
aaatacttcattcttggcca

SEQ ID NO: 835 - DNA, 20 bp, Artificial sequence
  Synthetic oligonucleotide
tcctaatccttcccccatca

SEQ ID NO: 836 - DNA, 20 bp, Artificial sequence
  Synthetic oligonucleotide
ttctgacttttcctttcctg

SEQ ID NO: 837 - DNA, 20 bp, Artificial sequence
  Synthetic oligonucleotide
tgctgcaaatatcacggcct

SEQ ID NO: 838 - DNA, 20 bp, Artificial sequence
  Synthetic oligonucleotide
gatgtggtaccccctgcccc

SEQ ID NO: 839 - DNA, 20 bp, Artificial sequence
  Synthetic oligonucleotide
ctccacatcctacaagggca

SEQ ID NO: 840 - DNA, 20 bp, Artificial sequence
  Synthetic oligonucleotide
aggacatcctccccactgga

SEQ ID NO: 841 - DNA, 20 bp, Artificial sequence
  Synthetic oligonucleotide
gagttaatcacatttttttt

SEQ ID NO: 842 - DNA, 20 bp, Artificial sequence
  Synthetic oligonucleotide
tcataccttatctctttcct

SEQ ID NO: 843 - DNA, 20 bp, Artificial sequence
  Synthetic oligonucleotide
ctaacatcactctcccagac

SEQ ID NO: 844 - DNA, 20 bp, Artificial sequence
  Synthetic oligonucleotide
cagccattatttatgtgggc

SEQ ID NO: 845 - DNA, 20 bp, Artificial sequence
  Synthetic oligonucleotide
ccattgatttcaaccaatta

SEQ ID NO: 846 - DNA, 20 bp, Artificial sequence
  Synthetic oligonucleotide
ccaaacactttccaaatcta

SEQ ID NO: 847 - DNA, 20 bp, Artificial sequence
  Synthetic oligonucleotide
aagcattcttcttctatgtc

SEQ ID NO: 848 - DNA, 20 bp, Artificial sequence
  Synthetic oligonucleotide
gaattgcatttactaggcta

SEQ ID NO: 849 - DNA, 20 bp, Artificial sequence
  Synthetic oligonucleotide
gtgctgagaatcccaggttt

SEQ ID NO: 850 - DNA, 20 bp, Artificial sequence
  Synthetic oligonucleotide
gccttatcttcagcttctaa

SEQ ID NO: 851 - DNA, 20 bp, Artificial sequence
  Synthetic oligonucleotide
cccaaatcataattataact

SEQ ID NO: 852 - DNA, 20 bp, Artificial sequence
  Synthetic oligonucleotide
aagagtagaaatcaattatt

SEQ ID NO: 853 - DNA, 20 bp, Artificial sequence
  Synthetic oligonucleotide
ttctctctacctgattccct

SEQ ID NO: 854 - DNA, 20 bp, Artificial sequence
  Synthetic oligonucleotide
caatgtaaccaatcacataa

SEQ ID NO: 855 - DNA, 20 bp, Artificial sequence
  Synthetic oligonucleotide
ctctcccaactttcttacgc

SEQ ID NO: 856 - DNA, 20 bp, Artificial sequence
  Synthetic oligonucleotide
agtgccctttcatttcacct

SEQ ID NO: 857 - DNA, 20 bp, Artificial sequence
  Synthetic oligonucleotide
cccaccgaagtatctactac

SEQ ID NO: 858 - DNA, 20 bp, Artificial sequence
  Synthetic oligonucleotide
actcctagacttttgggccc

SEQ ID NO: 859 - DNA, 20 bp, Artificial sequence
  Synthetic oligonucleotide
aataaatttcctaagggcct

SEQ ID NO: 860 - DNA, 20 bp, Artificial sequence
  Synthetic oligonucleotide
cagaaagttaaaaatgctgc

SEQ ID NO: 861 - DNA, 20 bp, Artificial sequence
  Synthetic oligonucleotide
gtgtgatcatacaacactgc

SEQ ID NO: 862 - DNA, 20 bp, Artificial sequence
  Synthetic oligonucleotide
aagtaacattaaataagggt

SEQ ID NO: 863 - DNA, 20 bp, Artificial sequence
  Synthetic oligonucleotide
tttagatgaatacatgggaa

SEQ ID NO: 864 - DNA, 20 bp, Artificial sequence
  Synthetic oligonucleotide
ggttctttaaaaaagtataa

SEQ ID NO: 865 - DNA, 20 bp, Artificial sequence
  Synthetic oligonucleotide
ccccaactactatcatattg

SEQ ID NO: 866 - DNA, 20 bp, Artificial sequence
  Synthetic oligonucleotide
ctttagtttcttacatccat

SEQ ID NO: 867 - DNA, 20 bp, Artificial sequence
  Synthetic oligonucleotide
tgggtttttcttcctagtta

SEQ ID NO: 868 - DNA, 20 bp, Artificial sequence
  Synthetic oligonucleotide
tcttcagcttctaaatgtac

SEQ ID NO: 869 - DNA, 20 bp, Artificial sequence
  Synthetic oligonucleotide
ccaaaagcaaaccatccctt

SEQ ID NO: 870 - DNA, 20 bp, Artificial sequence
  Synthetic oligonucleotide
gtcactaaaaacactgcttt

SEQ ID NO: 871 - DNA, 20 bp, Artificial sequence
  Synthetic oligonucleotide
aaaggtacatttatacaact

SEQ ID NO: 872 - DNA, 20 bp, Artificial sequence
  Synthetic oligonucleotide
ttgatttcaaccaattacca

SEQ ID NO: 873 - DNA, 20 bp, Artificial sequence
  Synthetic oligonucleotide
gatagttacctattttctat

SEQ ID NO: 874 - DNA, 20 bp, Artificial sequence
  Synthetic oligonucleotide
atcaccccaacacaaaatcc

SEQ ID NO: 875 - DNA, 20 bp, Artificial sequence
  Synthetic oligonucleotide
gttatgattaccaccacttc

SEQ ID NO: 876 - DNA, 20 bp, Artificial sequence
  Synthetic oligonucleotide
gtatcttaaaatacagattt

SEQ ID NO: 877 - DNA, 20 bp, Artificial sequence
  Synthetic oligonucleotide
taccttttctcctctttctg

SEQ ID NO: 878 - DNA, 20 bp, Artificial sequence
  Synthetic oligonucleotide
ggctgtatatttttatatta

SEQ ID NO: 879 - DNA, 20 bp, Artificial sequence
  Synthetic oligonucleotide
tctttttgcccacctgattc

SEQ ID NO: 880 - DNA, 20 bp, Artificial sequence
  Synthetic oligonucleotide
gtttgtcaacccttttttca

SEQ ID NO: 881 - DNA, 20 bp, Artificial sequence
  Synthetic oligonucleotide
gcccattgcttattacataa

SEQ ID NO: 882 - DNA, 20 bp, Artificial sequence
  Synthetic oligonucleotide
gtggtaccccctgccccatc

SEQ ID NO: 883 - DNA, 20 bp, Artificial sequence
  Synthetic oligonucleotide
ccatagaatatactttctac

SEQ ID NO: 884 - DNA, 20 bp, Artificial sequence
  Synthetic oligonucleotide
gtgaccctcccaccccaagt

SEQ ID NO: 885 - DNA, 20 bp, Artificial sequence
  Synthetic oligonucleotide
gataattacctcttccaaac

SEQ ID NO: 886 - DNA, 20 bp, Artificial sequence
  Synthetic oligonucleotide
ctcccaactttcttacgcaa

SEQ ID NO: 887 - DNA, 20 bp, Artificial sequence
  Synthetic oligonucleotide
attaagttatataaatttgc

SEQ ID NO: 888 - DNA, 20 bp, Artificial sequence
  Synthetic oligonucleotide
taatccttcccccatcataa

SEQ ID NO: 889 - DNA, 20 bp, Artificial sequence
  Synthetic oligonucleotide
gtaagtacccaaaagaagct

SEQ ID NO: 890 - DNA, 20 bp, Artificial sequence
  Synthetic oligonucleotide
caaatcataattataactct

SEQ ID NO: 891 - DNA, 20 bp, Artificial sequence
  Synthetic oligonucleotide
cttttctctattcatctcct

SEQ ID NO: 892 - DNA, 20 bp, Artificial sequence
  Synthetic oligonucleotide
tgctgctgccaaaaaagcat

SEQ ID NO: 893 - DNA, 20 bp, Artificial sequence
  Synthetic oligonucleotide
gcacacatttttactcaagt

SEQ ID NO: 894 - DNA, 20 bp, Artificial sequence
  Synthetic oligonucleotide
ggagtctctaaaacttcatc

SEQ ID NO: 895 - DNA, 20 bp, Artificial sequence
  Synthetic oligonucleotide
ataccttatctctttcctta

SEQ ID NO: 896 - DNA, 20 bp, Artificial sequence
  Synthetic oligonucleotide
ctatattcctccttctgcct

SEQ ID NO: 897 - DNA, 20 bp, Artificial sequence
  Synthetic oligonucleotide
caccagagaattacaatctc

SEQ ID NO: 898 - DNA, 20 bp, Artificial sequence
  Synthetic oligonucleotide
ctacctgattccctgatcta

SEQ ID NO: 899 - DNA, 20 bp, Artificial sequence
  Synthetic oligonucleotide
atgtaaccaatcacataatc

SEQ ID NO: 900 - DNA, 20 bp, Artificial sequence
  Synthetic oligonucleotide
tgtataccactctttagtcc

SEQ ID NO: 901 - DNA, 20 bp, Artificial sequence
  Synthetic oligonucleotide
gtttaactcctttgctccta

SEQ ID NO: 902 - DNA, 20 bp, Artificial sequence
  Synthetic oligonucleotide
agctctagaaataaattctg

SEQ ID NO: 903 - DNA, 20 bp, Artificial sequence
  Synthetic oligonucleotide
ccatctattttacaagtgaa

SEQ ID NO: 904 - DNA, 20 bp, Artificial sequence
  Synthetic oligonucleotide
atgtttgaaatatctcccga

SEQ ID NO: 905 - DNA, 20 bp, Artificial sequence
  Synthetic oligonucleotide
tggccagttttcacttccac

SEQ ID NO: 906 - DNA, 20 bp, Artificial sequence
  Synthetic oligonucleotide
gtttttaacatatattgacc

SEQ ID NO: 907 - DNA, 20 bp, Artificial sequence
  Synthetic oligonucleotide
caccacatcacacatcaaac

SEQ ID NO: 908 - DNA, 20 bp, Artificial sequence
  Synthetic oligonucleotide
tccacatcctacaagggcat

SEQ ID NO: 909 - DNA, 20 bp, Artificial sequence
  Synthetic oligonucleotide
aactgttttacatctaatca

SEQ ID NO: 910 - DNA, 20 bp, Artificial sequence
  Synthetic oligonucleotide
tctgacttttcctttcctgt

SEQ ID NO: 911 - DNA, 20 bp, Artificial sequence
  Synthetic oligonucleotide
catctcttttctccccataa

SEQ ID NO: 912 - DNA, 20 bp, Artificial sequence
  Synthetic oligonucleotide
aacatcactctcccagacta

SEQ ID NO: 913 - DNA, 20 bp, Artificial sequence
  Synthetic oligonucleotide
accgaagtatctactacaaa

SEQ ID NO: 914 - DNA, 20 bp, Artificial sequence
  Synthetic oligonucleotide
ctttagtgtctccttagtcc

SEQ ID NO: 915 - DNA, 20 bp, Artificial sequence
  Synthetic oligonucleotide
aagtagagtcacatactttt

SEQ ID NO: 916 - DNA, 20 bp, Artificial sequence
  Synthetic oligonucleotide
tttagtcacctcaagaaatc

SEQ ID NO: 917 - DNA, 20 bp, Artificial sequence
  Synthetic oligonucleotide
atacttttccatgttttcaa

SEQ ID NO: 918 - DNA, 20 bp, Artificial sequence
  Synthetic oligonucleotide
gacatcctccccactggaga

SEQ ID NO: 919 - DNA, 20 bp, Artificial sequence
  Synthetic oligonucleotide
gcaaacactacaaaatagga

SEQ ID NO: 920 - DNA, 20 bp, Artificial sequence
  Synthetic oligonucleotide
tcctattaacattttagcat

SEQ ID NO: 921 - DNA, 20 bp, Artificial sequence
  Synthetic oligonucleotide
gcaactacaatttattgaat

SEQ ID NO: 922 - DNA, 20 bp, Artificial sequence
  Synthetic oligonucleotide
agcattcttcttctatgtca

SEQ ID NO: 923 - DNA, 20 bp, Artificial sequence
  Synthetic oligonucleotide
tgcattctaccagtcaccct

SEQ ID NO: 924 - DNA, 20 bp, Artificial sequence
  Synthetic oligonucleotide
ataccacttcagcttaggca

SEQ ID NO: 925 - DNA, 20 bp, Artificial sequence
  Synthetic oligonucleotide
ctgaaaaaccttatacttga

SEQ ID NO: 926 - DNA, 20 bp, Artificial sequence
  Synthetic oligonucleotide
cacaagtctacagactggct

SEQ ID NO: 927 - DNA, 20 bp, Artificial sequence
  Synthetic oligonucleotide
aagtaacttttttataagtt

SEQ ID NO: 928 - DNA, 20 bp, Artificial sequence
  Synthetic oligonucleotide
ggaagcttaaaaacacaagt

SEQ ID NO: 929 - DNA, 20 bp, Artificial sequence
  Synthetic oligonucleotide
tgcagaatattataattcta

SEQ ID NO: 930 - DNA, 20 bp, Artificial sequence
  Synthetic oligonucleotide
tgccctttcatttcaccttt

SEQ ID NO: 931 - DNA, 20 bp, Artificial sequence
  Synthetic oligonucleotide
cattagatatttattaagta

SEQ ID NO: 932 - DNA, 20 bp, Artificial sequence
  Synthetic oligonucleotide
tttctgttcattacctagct

SEQ ID NO: 933 - DNA, 20 bp, Artificial sequence
  Synthetic oligonucleotide
gtgttttctttttctgctct

SEQ ID NO: 934 - DNA, 20 bp, Artificial sequence
  Synthetic oligonucleotide
ctagtacccacatcctagga

SEQ ID NO: 935 - DNA, 20 bp, Artificial sequence
  Synthetic oligonucleotide
ctgagcaacattacaatctc

SEQ ID NO: 936 - DNA, 20 bp, Artificial sequence
  Synthetic oligonucleotide
tgcatggtatttctaagtaa

SEQ ID NO: 937 - DNA, 20 bp, Artificial sequence
  Synthetic oligonucleotide
tccttaaatatcataaagga

SEQ ID NO: 938 - DNA, 20 bp, Artificial sequence
  Synthetic oligonucleotide
ttagatgaatacatgggaat

SEQ ID NO: 939 - DNA, 20 bp, Artificial sequence
  Synthetic oligonucleotide
acatcctccccactggagaa

SEQ ID NO: 940 - DNA, 20 bp, Artificial sequence
  Synthetic oligonucleotide
gcattctaccagtcaccctt

SEQ ID NO: 941 - DNA, 20 bp, Artificial sequence
  Synthetic oligonucleotide
gctgctgccaaaaaagcata

SEQ ID NO: 942 - DNA, 20 bp, Artificial sequence
  Synthetic oligonucleotide
aagcttaaaaacacaagtgt

SEQ ID NO: 943 - DNA, 20 bp, Artificial sequence
  Synthetic oligonucleotide
ccttaaatatcataaaggac

SEQ ID NO: 944 - DNA, 20 bp, Artificial sequence
  Synthetic oligonucleotide
attacctcttccaaacttta

SEQ ID NO: 945 - DNA, 20 bp, Artificial sequence
  Synthetic oligonucleotide
accttttctcctctttctgt

SEQ ID NO: 946 - DNA, 20 bp, Artificial sequence
  Synthetic oligonucleotide
accccaacacaaaatcccca

SEQ ID NO: 947 - DNA, 20 bp, Artificial sequence
  Synthetic oligonucleotide
tgtgatcatacaacactgca

SEQ ID NO: 948 - DNA, 20 bp, Artificial sequence
  Synthetic oligonucleotide
ctgtatatttttatattagc

SEQ ID NO: 949 - DNA, 20 bp, Artificial sequence
  Synthetic oligonucleotide
gttacctattttctatgact

SEQ ID NO: 950 - DNA, 20 bp, Artificial sequence
  Synthetic oligonucleotide
tagatatttattaagtattt

SEQ ID NO: 951 - DNA, 20 bp, Artificial sequence
  Synthetic oligonucleotide
aagaatgaaacagaatgtta

SEQ ID NO: 952 - DNA, 20 bp, Artificial sequence
  Synthetic oligonucleotide
tttagtgtctccttagtcca

SEQ ID NO: 953 - DNA, 20 bp, Artificial sequence
  Synthetic oligonucleotide
ggtatctgaaataattcctt

SEQ ID NO: 954 - DNA, 20 bp, Artificial sequence
  Synthetic oligonucleotide
tgtaaccaatcacataatcc

SEQ ID NO: 955 - DNA, 20 bp, Artificial sequence
  Synthetic oligonucleotide
cttacatccattactgagaa

SEQ ID NO: 956 - DNA, 20 bp, Artificial sequence
  Synthetic oligonucleotide
tgagcaacattacaatctca

SEQ ID NO: 957 - DNA, 20 bp, Artificial sequence
  Synthetic oligonucleotide
caagtgactgcaacaccctc

SEQ ID NO: 958 - DNA, 20 bp, Artificial sequence
  Synthetic oligonucleotide
tactgactgctctcttttca

SEQ ID NO: 959 - DNA, 20 bp, Artificial sequence
  Synthetic oligonucleotide
gcattgctcctttttaggct

SEQ ID NO: 960 - DNA, 20 bp, Artificial sequence
  Synthetic oligonucleotide
actgttttacatctaatcaa

SEQ ID NO: 961 - DNA, 20 bp, Artificial sequence
  Synthetic oligonucleotide
gaagtatctactacaaaatt

SEQ ID NO: 962 - DNA, 20 bp, Artificial sequence
  Synthetic oligonucleotide
ctgacttttcctttcctgtc

SEQ ID NO: 963 - DNA, 20 bp, Artificial sequence
  Synthetic oligonucleotide
tagtacccacatcctaggaa

SEQ ID NO: 964 - DNA, 20 bp, Artificial sequence
  Synthetic oligonucleotide
gggcagctcccacggaggct

SEQ ID NO: 965 - DNA, 20 bp, Artificial sequence
  Synthetic oligonucleotide
atccttcccccatcataaaa

SEQ ID NO: 966 - DNA, 20 bp, Artificial sequence
  Synthetic oligonucleotide
ttagtcacctcaagaaatca

SEQ ID NO: 967 - DNA, 20 bp, Artificial sequence
  Synthetic oligonucleotide
aacactgcttttattcagct

SEQ ID NO: 968 - DNA, 20 bp, Artificial sequence
  Synthetic oligonucleotide
aacattttagcatacaccct

SEQ ID NO: 969 - DNA, 20 bp, Artificial sequence
  Synthetic oligonucleotide
accacatcacacatcaaaca

SEQ ID NO: 970 - DNA, 20 bp, Artificial sequence
  Synthetic oligonucleotide
cttcctagttacatttttcc

SEQ ID NO: 971 - DNA, 20 bp, Artificial sequence
  Synthetic oligonucleotide
acatcactctcccagactac

SEQ ID NO: 972 - DNA, 20 bp, Artificial sequence
  Synthetic oligonucleotide
ttatgattaccaccacttca

SEQ ID NO: 973 - DNA, 20 bp, Artificial sequence
  Synthetic oligonucleotide
ccctgccccatctcccactg

SEQ ID NO: 974 - DNA, 20 bp, Artificial sequence
  Synthetic oligonucleotide
tatcatgtaaacttcagcaa

SEQ ID NO: 975 - DNA, 20 bp, Artificial sequence
  Synthetic oligonucleotide
gccctttcatttcacctttc

SEQ ID NO: 976 - DNA, 20 bp, Artificial sequence
  Synthetic oligonucleotide
gaaaaaccttatacttgaca

SEQ ID NO: 977 - DNA, 20 bp, Artificial sequence
  Synthetic oligonucleotide
gagatcagctatcagaaata

SEQ ID NO: 978 - DNA, 20 bp, Artificial sequence
  Synthetic oligonucleotide
tttccagatcgaaccaatca

SEQ ID NO: 979 - DNA, 20 bp, Artificial sequence
  Synthetic oligonucleotide
ttaagttatataaatttgca

SEQ ID NO: 980 - DNA, 20 bp, Artificial sequence
  Synthetic oligonucleotide
cacacatttttactcaagtg

SEQ ID NO: 981 - DNA, 20 bp, Artificial sequence
  Synthetic oligonucleotide
actaactaaattctcacaga

SEQ ID NO: 982 - DNA, 20 bp, Artificial sequence
  Synthetic oligonucleotide
tagaatatactttctacgct

SEQ ID NO: 983 - DNA, 20 bp, Artificial sequence
  Synthetic oligonucleotide
ataaagtcaaattttaggat

SEQ ID NO: 984 - DNA, 20 bp, Artificial sequence
  Synthetic oligonucleotide
atattcctccttctgcctgc

SEQ ID NO: 985 - DNA, 20 bp, Artificial sequence
  Synthetic oligonucleotide
caactacaatttattgaatc

SEQ ID NO: 986 - DNA, 20 bp, Artificial sequence
  Synthetic oligonucleotide
ctcctttgctcctaacacct

SEQ ID NO: 987 - DNA, 20 bp, Artificial sequence
  Synthetic oligonucleotide
agctcaatgtcatccagtta

SEQ ID NO: 988 - DNA, 20 bp, Artificial sequence
  Synthetic oligonucleotide
aagcaaaccatcccttctgc

SEQ ID NO: 989 - DNA, 20 bp, Artificial sequence
  Synthetic oligonucleotide
ttttctctattcatctccta

SEQ ID NO: 990 - DNA, 20 bp, Artificial sequence
  Synthetic oligonucleotide
gctgcaaaaaaatcaaaaca

SEQ ID NO: 991 - DNA, 20 bp, Artificial sequence
  Synthetic oligonucleotide
tctcttttctccccataacc

SEQ ID NO: 992 - DNA, 20 bp, Artificial sequence
  Synthetic oligonucleotide
atagaccaaaattaactgca

SEQ ID NO: 993 - DNA, 20 bp, Artificial sequence
  Synthetic oligonucleotide
gagtctctaaaacttcatcc

SEQ ID NO: 994 - DNA, 20 bp, Artificial sequence
  Synthetic oligonucleotide
aacttttttataagttgcaa

SEQ ID NO: 995 - DNA, 20 bp, Artificial sequence
  Synthetic oligonucleotide
acctgattccctgatctata

SEQ ID NO: 996 - DNA, 20 bp, Artificial sequence
  Synthetic oligonucleotide
tgaccctcccaccccaagta

SEQ ID NO: 997 - DNA, 20 bp, Artificial sequence
  Synthetic oligonucleotide
gtagagtcacatacttttga

SEQ ID NO: 998 - DNA, 20 bp, Artificial sequence
  Synthetic oligonucleotide
ttctaagtaaacttctgttc

SEQ ID NO: 999 - DNA, 20 bp, Artificial sequence
  Synthetic oligonucleotide
aaatcataattataactcta

SEQ ID NO: 1000 - DNA, 20 bp, Artificial sequence
  Synthetic oligonucleotide
gagtagttccacctctgctt

SEQ ID NO: 1001 - DNA, 20 bp, Artificial sequence
  Synthetic oligonucleotide
gctctagaaataaattctgc

SEQ ID NO: 1002 - DNA, 20 bp, Artificial sequence
  Synthetic oligonucleotide
accagagaattacaatctcc

SEQ ID NO: 1003 - DNA, 20 bp, Artificial sequence
  Synthetic oligonucleotide
caaacactacaaaataggac

SEQ ID NO: 1004 - DNA, 20 bp, Artificial sequence
  Synthetic oligonucleotide
gttttctttttctgctctta

SEQ ID NO: 1005 - DNA, 20 bp, Artificial sequence
  Synthetic oligonucleotide
tttgtcaacccttttttcat

SEQ ID NO: 1006 - DNA, 20 bp, Artificial sequence
  Synthetic oligonucleotide
ccattgcttattacataaaa

SEQ ID NO: 1007 - DNA, 20 bp, Artificial sequence
  Synthetic oligonucleotide
aaggtacatttatacaactt

SEQ ID NO: 1008 - DNA, 20 bp, Artificial sequence
  Synthetic oligonucleotide
cttatctctttccttatggc

SEQ ID NO: 1009 - DNA, 20 bp, Artificial sequence
  Synthetic oligonucleotide
tctatgtcagtctcctatca

SEQ ID NO: 1010 - DNA, 20 bp, Artificial sequence
  Synthetic oligonucleotide
ggccagttttcacttccact

SEQ ID NO: 1011 - DNA, 20 bp, Artificial sequence
  Synthetic oligonucleotide
ccaactactatcatattgga

SEQ ID NO: 1012 - DNA, 20 bp, Artificial sequence
  Synthetic oligonucleotide
gttcagagaaatactcatct

SEQ ID NO: 1013 - DNA, 20 bp, Artificial sequence
  Synthetic oligonucleotide
gtataccactctttagtcct

SEQ ID NO: 1014 - DNA, 20 bp, Artificial sequence
  Synthetic oligonucleotide
attctagtaattttgggcct

SEQ ID NO: 1015 - DNA, 20 bp, Artificial sequence
  Synthetic oligonucleotide
gttttacatctaatcaagat

SEQ ID NO: 1016 - DNA, 20 bp, Artificial sequence
  Synthetic oligonucleotide
tgtatatttttatattagca

SEQ ID NO: 1017 - DNA, 20 bp, Artificial sequence
  Synthetic oligonucleotide
actgatctctcactttgata

SEQ ID NO: 1018 - DNA, 20 bp, Artificial sequence
  Synthetic oligonucleotide
gcaaaccatcccttctgctt

SEQ ID NO: 1019 - DNA, 20 bp, Artificial sequence
  Synthetic oligonucleotide
tgcttattacataaaattgt

SEQ ID NO: 1020 - DNA, 20 bp, Artificial sequence
  Synthetic oligonucleotide
gtaaccaatcacataatccg

SEQ ID NO: 1021 - DNA, 20 bp, Artificial sequence
  Synthetic oligonucleotide
tacctattttctatgacttc

SEQ ID NO: 1022 - DNA, 20 bp, Artificial sequence
  Synthetic oligonucleotide
actgctctcttttcacttcc

SEQ ID NO: 1023 - DNA, 20 bp, Artificial sequence
  Synthetic oligonucleotide
gttcagaaaaaatacttgtc

SEQ ID NO: 1024 - DNA, 20 bp, Artificial sequence
  Synthetic oligonucleotide
ataccactctttagtcctaa

SEQ ID NO: 1025 - DNA, 20 bp, Artificial sequence
  Synthetic oligonucleotide
ccacatcacacatcaaacag

SEQ ID NO: 1026 - DNA, 20 bp, Artificial sequence
  Synthetic oligonucleotide
tttagcatacacccttccac

SEQ ID NO: 1027 - DNA, 20 bp, Artificial sequence
  Synthetic oligonucleotide
ctgcctctcctcttgaataa

SEQ ID NO: 1028 - DNA, 20 bp, Artificial sequence
  Synthetic oligonucleotide
ctaccagtcacccttggttc

SEQ ID NO: 1029 - DNA, 20 bp, Artificial sequence
  Synthetic oligonucleotide
ctgccccatctcccactgca

SEQ ID NO: 1030 - DNA, 20 bp, Artificial sequence
  Synthetic oligonucleotide
agtctctaaaacttcatccc

SEQ ID NO: 1031 - DNA, 20 bp, Artificial sequence
  Synthetic oligonucleotide
aactactatcatattggagt

SEQ ID NO: 1032 - DNA, 20 bp, Artificial sequence
  Synthetic oligonucleotide
aactacaatttattgaatct

SEQ ID NO: 1033 - DNA, 20 bp, Artificial sequence
  Synthetic oligonucleotide
caggccactgcatccagccc

SEQ ID NO: 1034 - DNA, 20 bp, Artificial sequence
  Synthetic oligonucleotide
aattttaggattaattcgcc

SEQ ID NO: 1035 - DNA, 20 bp, Artificial sequence
  Synthetic oligonucleotide
taagttatataaatttgcaa

SEQ ID NO: 1036 - DNA, 20 bp, Artificial sequence
  Synthetic oligonucleotide
gaatcatgttaaaaatgcaa

SEQ ID NO: 1037 - DNA, 20 bp, Artificial sequence
  Synthetic oligonucleotide
taggtcagctccagcagcct

SEQ ID NO: 1038 - DNA, 20 bp, Artificial sequence
  Synthetic oligonucleotide
gcaaaattctgagatggccc

SEQ ID NO: 1039 - DNA, 20 bp, Artificial sequence
  Synthetic oligonucleotide
ttcaggttcccagcctgaat

SEQ ID NO: 1040 - DNA, 20 bp, Artificial sequence
  Synthetic oligonucleotide
tccttcccccatcataaaat

SEQ ID NO: 1041 - DNA, 20 bp, Artificial sequence
  Synthetic oligonucleotide
atcatgtaaacttcagcaat

SEQ ID NO: 1042 - DNA, 20 bp, Artificial sequence
  Synthetic oligonucleotide
tctgaaataattccttctct

SEQ ID NO: 1043 - DNA, 20 bp, Artificial sequence
  Synthetic oligonucleotide
taactgcaatttaccatcta

SEQ ID NO: 1044 - DNA, 20 bp, Artificial sequence
  Synthetic oligonucleotide
caatgtcatccagttagtta

SEQ ID NO: 1045 - DNA, 20 bp, Artificial sequence
  Synthetic oligonucleotide
agagtcacatacttttgata

SEQ ID NO: 1046 - DNA, 20 bp, Artificial sequence
  Synthetic oligonucleotide
ccagttttcacttccacttt

SEQ ID NO: 1047 - DNA, 20 bp, Artificial sequence
  Synthetic oligonucleotide
atcaaaacaattactatgga

SEQ ID NO: 1048 - DNA, 20 bp, Artificial sequence
  Synthetic oligonucleotide
aggtacatttatacaacttc

SEQ ID NO: 1049 - DNA, 20 bp, Artificial sequence
  Synthetic oligonucleotide
ccagatcgaaccaatcaaat

SEQ ID NO: 1050 - DNA, 20 bp, Artificial sequence
  Synthetic oligonucleotide
agtatctactacaaaatttt

SEQ ID NO: 1051 - DNA, 20 bp, Artificial sequence
  Synthetic oligonucleotide
gagcaacattacaatctcat

SEQ ID NO: 1052 - DNA, 20 bp, Artificial sequence
  Synthetic oligonucleotide
atcagctatcagaaatacct

SEQ ID NO: 1053 - DNA, 20 bp, Artificial sequence
  Synthetic oligonucleotide
ctgctgccaaaaaagcatat

SEQ ID NO: 1054 - DNA, 20 bp, Artificial sequence
  Synthetic oligonucleotide
aagttgcaaatttctagtca

SEQ ID NO: 1055 - DNA, 20 bp, Artificial sequence
  Synthetic oligonucleotide
cctgatctataaaatcggga

SEQ ID NO: 1056 - DNA, 20 bp, Artificial sequence
  Synthetic oligonucleotide
tatgattaccaccacttcag

SEQ ID NO: 1057 - DNA, 20 bp, Artificial sequence
  Synthetic oligonucleotide
ttcagagaaatactcatcta

SEQ ID NO: 1058 - DNA, 20 bp, Artificial sequence
  Synthetic oligonucleotide
cctttgctcctaacacctct

SEQ ID NO: 1059 - DNA, 20 bp, Artificial sequence
  Synthetic oligonucleotide
gctgatagaatattttagtc

SEQ ID NO: 1060 - DNA, 20 bp, Artificial sequence
  Synthetic oligonucleotide
acactgcttttattcagctt

SEQ ID NO: 1061 - DNA, 20 bp, Artificial sequence
  Synthetic oligonucleotide
tacctcttccaaactttaca

SEQ ID NO: 1062 - DNA, 20 bp, Artificial sequence
  Synthetic oligonucleotide
taggactttttctttctgga

SEQ ID NO: 1063 - DNA, 20 bp, Artificial sequence
  Synthetic oligonucleotide
agtgtctccttagtccactc

SEQ ID NO: 1064 - DNA, 20 bp, Artificial sequence
  Synthetic oligonucleotide
ctcttttctccccataaccc

SEQ ID NO: 1065 - DNA, 20 bp, Artificial sequence
  Synthetic oligonucleotide
ttatctctttccttatggct

SEQ ID NO: 1066 - DNA, 20 bp, Artificial sequence
  Synthetic oligonucleotide
gctagtgatttcctcaggga

SEQ ID NO: 1067 - DNA, 20 bp, Artificial sequence
  Synthetic oligonucleotide
gacacagttcatttctggtc

SEQ ID NO: 1068 - DNA, 20 bp, Artificial sequence
  Synthetic oligonucleotide
ccagagaattacaatctcca

SEQ ID NO: 1069 - DNA, 20 bp, Artificial sequence
  Synthetic oligonucleotide
gtcagtctcctatcattgcc

SEQ ID NO: 1070 - DNA, 20 bp, Artificial sequence
  Synthetic oligonucleotide
tctgcttgactccacaggga

SEQ ID NO: 1071 - DNA, 20 bp, Artificial sequence
  Synthetic oligonucleotide
ttgtcaacccttttttcatt

SEQ ID NO: 1072 - DNA, 20 bp, Artificial sequence
  Synthetic oligonucleotide
attaagtatttacaattgcc

SEQ ID NO: 1073 - DNA, 20 bp, Artificial sequence
  Synthetic oligonucleotide
aatcataattataactctaa

SEQ ID NO: 1074 - DNA, 20 bp, Artificial sequence
  Synthetic oligonucleotide
tcctagttacatttttcccc

SEQ ID NO: 1075 - DNA, 20 bp, Artificial sequence
  Synthetic oligonucleotide
gctcgcattttatcattata

SEQ ID NO: 1076 - DNA, 20 bp, Artificial sequence
  Synthetic oligonucleotide
ttggtctgactcatctcatc

SEQ ID NO: 1077 - DNA, 20 bp, Artificial sequence
  Synthetic oligonucleotide
ttttctgctcttatacgcaa

SEQ ID NO: 1078 - DNA, 20 bp, Artificial sequence
  Synthetic oligonucleotide
agaaaacctatcttctggca

SEQ ID NO: 1079 - DNA, 20 bp, Artificial sequence
  Synthetic oligonucleotide
actaaattctcacagaacta

SEQ ID NO: 1080 - DNA, 20 bp, Artificial sequence
  Synthetic oligonucleotide
agtacccacatcctaggaaa

SEQ ID NO: 1081 - DNA, 20 bp, Artificial sequence
  Synthetic oligonucleotide
ctagaaataaattctgccaa

SEQ ID NO: 1082 - DNA, 20 bp, Artificial sequence
  Synthetic oligonucleotide
tttctctattcatctcctac

SEQ ID NO: 1083 - DNA, 20 bp, Artificial sequence
  Synthetic oligonucleotide
tgacttttcctttcctgtct

SEQ ID NO: 1084 - DNA, 20 bp, Artificial sequence
  Synthetic oligonucleotide
tgatcatacaacactgcagc

SEQ ID NO: 1085 - DNA, 20 bp, Artificial sequence
  Synthetic oligonucleotide
actgcaacaccctcttccaa

SEQ ID NO: 1086 - DNA, 20 bp, Artificial sequence
  Synthetic oligonucleotide
ccttttctcctctttctgta

SEQ ID NO: 1087 - DNA, 20 bp, Artificial sequence
  Synthetic oligonucleotide
tcactctcccagactacatt

SEQ ID NO: 1088 - DNA, 20 bp, Artificial sequence
  Synthetic oligonucleotide
cagtggtgaacacagggcca

SEQ ID NO: 1089 - DNA, 20 bp, Artificial sequence
  Synthetic oligonucleotide
ccccaacacaaaatccccaa

SEQ ID NO: 1090 - DNA, 20 bp, Artificial sequence
  Synthetic oligonucleotide
tttcatttcacctttcagga

SEQ ID NO: 1091 - DNA, 20 bp, Artificial sequence
  Synthetic oligonucleotide
atatgtgctttctcaatttt

SEQ ID NO: 1092 - DNA, 20 bp, Artificial sequence
  Synthetic oligonucleotide
ttcagaaaaaatacttgtca

SEQ ID NO: 1093 - DNA, 20 bp, Artificial sequence
  Synthetic oligonucleotide
gtatatttttatattagcat

SEQ ID NO: 1094 - DNA, 20 bp, Artificial sequence
  Synthetic oligonucleotide
tgcatattaaaaagtcgcct

SEQ ID NO: 1095 - DNA, 20 bp, Artificial sequence
  Synthetic oligonucleotide
gctctcttttcacttccaga

SEQ ID NO: 1096 - DNA, 20 bp, Artificial sequence
  Synthetic oligonucleotide
gggtacttgcttacctgccc

SEQ ID NO: 1097 - DNA, 20 bp, Artificial sequence
  Synthetic oligonucleotide
atagtgtatctcagcagctt

SEQ ID NO: 1098 - DNA, 20 bp, Artificial sequence
  Synthetic oligonucleotide
aaattgtattcaatttccga

SEQ ID NO: 1099 - DNA, 20 bp, Artificial sequence
  Synthetic oligonucleotide
ctctaagttacaaaattata

SEQ ID NO: 1100 - DNA, 20 bp, Artificial sequence
  Synthetic oligonucleotide
gaaaaagtcacattcccgac

SEQ ID NO: 1101 - DNA, 20 bp, Artificial sequence
  Synthetic oligonucleotide
gatcatacaacactgcagcc

SEQ ID NO: 1102 - DNA, 20 bp, Artificial sequence
  Synthetic oligonucleotide
cctagttacatttttccccc

SEQ ID NO: 1103 - DNA, 20 bp, Artificial sequence
  Synthetic oligonucleotide
ttagcatacacccttccact

SEQ ID NO: 1104 - DNA, 20 bp, Artificial sequence
  Synthetic oligonucleotide
ccttcccccatcataaaatt

SEQ ID NO: 1105 - DNA, 20 bp, Artificial sequence
  Synthetic oligonucleotide
cccaacacaaaatccccaaa

SEQ ID NO: 1106 - DNA, 20 bp, Artificial sequence
  Synthetic oligonucleotide
tatacgcaatttaatttctt

SEQ ID NO: 1107 - DNA, 20 bp, Artificial sequence
  Synthetic oligonucleotide
gcaaatttctagtcagactc

SEQ ID NO: 1108 - DNA, 20 bp, Artificial sequence
  Synthetic oligonucleotide
tcttttctccccataaccca

SEQ ID NO: 1109 - DNA, 20 bp, Artificial sequence
  Synthetic oligonucleotide
ggtctgactcatctcatcca

SEQ ID NO: 1110 - DNA, 20 bp, Artificial sequence
  Synthetic oligonucleotide
tcaaaacaattactatggaa

SEQ ID NO: 1111 - DNA, 20 bp, Artificial sequence
  Synthetic oligonucleotide
tatctctttccttatggctt

SEQ ID NO: 1112 - DNA, 20 bp, Artificial sequence
  Synthetic oligonucleotide
cagaagctacttttatattt

SEQ ID NO: 1113 - DNA, 20 bp, Artificial sequence
  Synthetic oligonucleotide
tctcacagaactatttgcct

SEQ ID NO: 1114 - DNA, 20 bp, Artificial sequence
  Synthetic oligonucleotide
tatgtgctttctcaattttt

SEQ ID NO: 1115 - DNA, 20 bp, Artificial sequence
  Synthetic oligonucleotide
gagataacatttcattgagt

SEQ ID NO: 1116 - DNA, 20 bp, Artificial sequence
  Synthetic oligonucleotide
gctactgttctaataagttt

SEQ ID NO: 1117 - DNA, 20 bp, Artificial sequence
  Synthetic oligonucleotide
tgatctataaaatcgggaca

SEQ ID NO: 1118 - DNA, 20 bp, Artificial sequence
  Synthetic oligonucleotide
atcgaaccaatcaaatgtac

SEQ ID NO: 1119 - DNA, 20 bp, Artificial sequence
  Synthetic oligonucleotide
cactctttagtcctaaacca

SEQ ID NO: 1120 - DNA, 20 bp, Artificial sequence
  Synthetic oligonucleotide
acttttcctttcctgtctta

SEQ ID NO: 1121 - DNA, 20 bp, Artificial sequence
  Synthetic oligonucleotide
acccacctcccagtcggtca

SEQ ID NO: 1122 - DNA, 20 bp, Artificial sequence
  Synthetic oligonucleotide
aactgcaatttaccatctaa

SEQ ID NO: 1123 - DNA, 20 bp, Artificial sequence
  Synthetic oligonucleotide
agctgcttaaagtttagctt

SEQ ID NO: 1124 - DNA, 20 bp, Artificial sequence
  Synthetic oligonucleotide
ttcatttcacctttcaggac

SEQ ID NO: 1125 - DNA, 20 bp, Artificial sequence
  Synthetic oligonucleotide
ctccttagtccactctccca

SEQ ID NO: 1126 - DNA, 20 bp, Artificial sequence
  Synthetic oligonucleotide
cactgcttttattcagcttt

SEQ ID NO: 1127 - DNA, 20 bp, Artificial sequence
  Synthetic oligonucleotide
ctgatagaatattttagtct

SEQ ID NO: 1128 - DNA, 20 bp, Artificial sequence
  Synthetic oligonucleotide
ctcgcattttatcattataa

SEQ ID NO: 1129 - DNA, 20 bp, Artificial sequence
  Synthetic oligonucleotide
acacagttcatttctggtca

SEQ ID NO: 1130 - DNA, 20 bp, Artificial sequence
  Synthetic oligonucleotide
acaaggcttttccaaaggtc

SEQ ID NO: 1131 - DNA, 20 bp, Artificial sequence
  Synthetic oligonucleotide
ccgtaatttcttctattaca

SEQ ID NO: 1132 - DNA, 20 bp, Artificial sequence
  Synthetic oligonucleotide
cgtatagtaatatttacttt

SEQ ID NO: 1133 - DNA, 20 bp, Artificial sequence
  Synthetic oligonucleotide
gtatactacatatttgtgga

SEQ ID NO: 1134 - DNA, 20 bp, Artificial sequence
  Synthetic oligonucleotide
atcatgttaaaaatgcaaat

SEQ ID NO: 1135 - DNA, 20 bp, Artificial sequence
  Synthetic oligonucleotide
gttttcacttccacttttac

SEQ ID NO: 1136 - DNA, 20 bp, Artificial sequence
  Synthetic oligonucleotide
gcttattacataaaattgtt

SEQ ID NO: 1137 - DNA, 20 bp, Artificial sequence
  Synthetic oligonucleotide
taaccaatcacataatccgg

SEQ ID NO: 1138 - DNA, 20 bp, Artificial sequence
  Synthetic oligonucleotide
tcatgtaaacttcagcaata

SEQ ID NO: 1139 - DNA, 20 bp, Artificial sequence
  Synthetic oligonucleotide
atgattaccaccacttcaga

SEQ ID NO: 1140 - DNA, 20 bp, Artificial sequence
  Synthetic oligonucleotide
ttaagtatttacaattgcca

SEQ ID NO: 1141 - DNA, 20 bp, Artificial sequence
  Synthetic oligonucleotide
tccagcagcctctaatcctc

SEQ ID NO: 1142 - DNA, 20 bp, Artificial sequence
  Synthetic oligonucleotide
ttctctattcatctcctaca

SEQ ID NO: 1143 - DNA, 20 bp, Artificial sequence
  Synthetic oligonucleotide
cctcttccaaactttacaga

SEQ ID NO: 1144 - DNA, 20 bp, Artificial sequence
  Synthetic oligonucleotide
tatctactacaaaattttgt

SEQ ID NO: 1145 - DNA, 20 bp, Artificial sequence
  Synthetic oligonucleotide
tcctcttgaataattaagta

SEQ ID NO: 1146 - DNA, 20 bp, Artificial sequence
  Synthetic oligonucleotide
tttctgtaacttacatagta

SEQ ID NO: 1147 - DNA, 20 bp, Artificial sequence
  Synthetic oligonucleotide
tcagctatcagaaatacctc

SEQ ID NO: 1148 - DNA, 20 bp, Artificial sequence
  Synthetic oligonucleotide
gataagttatatatttttta

SEQ ID NO: 1149 - DNA, 20 bp, Artificial sequence
  Synthetic oligonucleotide
gagatggcccccaagattcc

SEQ ID NO: 1150 - DNA, 20 bp, Artificial sequence
  Synthetic oligonucleotide
gtctctaaaacttcatccct

SEQ ID NO: 1151 - DNA, 20 bp, Artificial sequence
  Synthetic oligonucleotide
ttgttgttaatcctgtgcca

SEQ ID NO: 1152 - DNA, 20 bp, Artificial sequence
  Synthetic oligonucleotide
ttgctctattattattggca

SEQ ID NO: 1153 - DNA, 20 bp, Artificial sequence
  Synthetic oligonucleotide
attctgccaacaacatgtga

SEQ ID NO: 1154 - DNA, 20 bp, Artificial sequence
  Synthetic oligonucleotide
atacctcatctatactggaa

SEQ ID NO: 1155 - DNA, 20 bp, Artificial sequence
  Synthetic oligonucleotide
agagaattacaatctccagt

SEQ ID NO: 1156 - DNA, 20 bp, Artificial sequence
  Synthetic oligonucleotide
tgtcaacccttttttcatta

SEQ ID NO: 1157 - DNA, 20 bp, Artificial sequence
  Synthetic oligonucleotide
atttattgaatctctactac

SEQ ID NO: 1158 - DNA, 20 bp, Artificial sequence
  Synthetic oligonucleotide
aggactttttctttctggaa

SEQ ID NO: 1159 - DNA, 20 bp, Artificial sequence
  Synthetic oligonucleotide
ttgcaaataaaaaattgttt

SEQ ID NO: 1160 - DNA, 20 bp, Artificial sequence
  Synthetic oligonucleotide
ctgcaacaccctcttccaaa

SEQ ID NO: 1161 - DNA, 20 bp, Artificial sequence
  Synthetic oligonucleotide
aagcatatgatctattccta

SEQ ID NO: 1162 - DNA, 20 bp, Artificial sequence
  Synthetic oligonucleotide
tcagtctcctatcattgcca

SEQ ID NO: 1163 - DNA, 20 bp, Artificial sequence
  Synthetic oligonucleotide
acatcacacatcaaacagcc

SEQ ID NO: 1164 - DNA, 20 bp, Artificial sequence
  Synthetic oligonucleotide
gcatccagcccacataaagt

SEQ ID NO: 1165 - DNA, 20 bp, Artificial sequence
  Synthetic oligonucleotide
ctgaaataattccttctcta

SEQ ID NO: 1166 - DNA, 20 bp, Artificial sequence
  Synthetic oligonucleotide
taccagtcacccttggttca

SEQ ID NO: 1167 - DNA, 20 bp, Artificial sequence
  Synthetic oligonucleotide
tacatttatacaacttctga

SEQ ID NO: 1168 - DNA, 20 bp, Artificial sequence
  Synthetic oligonucleotide
attttaggattaattcgcct

SEQ ID NO: 1169 - DNA, 20 bp, Artificial sequence
  Synthetic oligonucleotide
gcagctttcccctctgtgtt

SEQ ID NO: 1170 - DNA, 20 bp, Artificial sequence
  Synthetic oligonucleotide
ctctttagtcctaaaccaca

SEQ ID NO: 1171 - DNA, 20 bp, Artificial sequence
  Synthetic oligonucleotide
gtcacattcccgacagactc

SEQ ID NO: 1172 - DNA, 20 bp, Artificial sequence
  Synthetic oligonucleotide
ctcacagaactatttgcctt

SEQ ID NO: 1173 - DNA, 20 bp, Artificial sequence
  Synthetic oligonucleotide
gaagctacttttatattttc

SEQ ID NO: 1174 - DNA, 20 bp, Artificial sequence
  Synthetic oligonucleotide
caggagagatctacttatct

SEQ ID NO: 1175 - DNA, 20 bp, Artificial sequence
  Synthetic oligonucleotide
attaccaccacttcagagaa

SEQ ID NO: 1176 - DNA, 20 bp, Artificial sequence
  Synthetic oligonucleotide
cagtctcctatcattgccat

SEQ ID NO: 1177 - DNA, 20 bp, Artificial sequence
  Synthetic oligonucleotide
tatcatgtaccacacaggta

SEQ ID NO: 1178 - DNA, 20 bp, Artificial sequence
  Synthetic oligonucleotide
agtttgttccatagaaacac

SEQ ID NO: 1179 - DNA, 20 bp, Artificial sequence
  Synthetic oligonucleotide
ccccatcataaaattaaata

SEQ ID NO: 1180 - DNA, 20 bp, Artificial sequence
  Synthetic oligonucleotide
tctctattcatctcctacaa

SEQ ID NO: 1181 - DNA, 20 bp, Artificial sequence
  Synthetic oligonucleotide
agtcgcctaagaacatacta

SEQ ID NO: 1182 - DNA, 20 bp, Artificial sequence
  Synthetic oligonucleotide
ttcctttcctgtcttagcta

SEQ ID NO: 1183 - DNA, 20 bp, Artificial sequence
  Synthetic oligonucleotide
cttttctccccataacccat

SEQ ID NO: 1184 - DNA, 20 bp, Artificial sequence
  Synthetic oligonucleotide
tctaaaacttcatccctgaa

SEQ ID NO: 1185 - DNA, 20 bp, Artificial sequence
  Synthetic oligonucleotide
atgtgctttctcaatttttt

SEQ ID NO: 1186 - DNA, 20 bp, Artificial sequence
  Synthetic oligonucleotide
tgctctattattattggcaa

SEQ ID NO: 1187 - DNA, 20 bp, Artificial sequence
  Synthetic oligonucleotide
gagcaacattacaatctcac

SEQ ID NO: 1188 - DNA, 20 bp, Artificial sequence
  Synthetic oligonucleotide
tgttcataaggaaattccaa

SEQ ID NO: 1189 - DNA, 20 bp, Artificial sequence
  Synthetic oligonucleotide
ttctggatatatacagatgc

SEQ ID NO: 1190 - DNA, 20 bp, Artificial sequence
  Synthetic oligonucleotide
aaccaatcacataatccggc

SEQ ID NO: 1191 - DNA, 20 bp, Artificial sequence
  Synthetic oligonucleotide
aaatgcaaattcctgagttc

SEQ ID NO: 1192 - DNA, 20 bp, Artificial sequence
  Synthetic oligonucleotide
atggaactttattaatacaa

SEQ ID NO: 1193 - DNA, 20 bp, Artificial sequence
  Synthetic oligonucleotide
acttccacttttacatatct

SEQ ID NO: 1194 - DNA, 20 bp, Artificial sequence
  Synthetic oligonucleotide
taatgatgtcccataagtct

SEQ ID NO: 1195 - DNA, 20 bp, Artificial sequence
  Synthetic oligonucleotide
tgagctataaacttaaggtc

SEQ ID NO: 1196 - DNA, 20 bp, Artificial sequence
  Synthetic oligonucleotide
caacccttttttcattacct

SEQ ID NO: 1197 - DNA, 20 bp, Artificial sequence
  Synthetic oligonucleotide
gcattttatcattataaggt

SEQ ID NO: 1198 - DNA, 20 bp, Artificial sequence
  Synthetic oligonucleotide
ttcagcttttcatccatggt

SEQ ID NO: 1199 - DNA, 20 bp, Artificial sequence
  Synthetic oligonucleotide
agcatattaaacattaaaac

SEQ ID NO: 1200 - DNA, 20 bp, Artificial sequence
  Synthetic oligonucleotide
atctctttccttatggcttc

SEQ ID NO: 1201 - DNA, 20 bp, Artificial sequence
  Synthetic oligonucleotide
gctatcagaaatacctctca

SEQ ID NO: 1202 - DNA, 20 bp, Artificial sequence
  Synthetic oligonucleotide
acatgattatttctttggga

SEQ ID NO: 1203 - DNA, 20 bp, Artificial sequence
  Synthetic oligonucleotide
atcagaggtcttaatgcata

SEQ ID NO: 1204 - DNA, 20 bp, Artificial sequence
  Synthetic oligonucleotide
tccttagtccactctcccac

SEQ ID NO: 1205 - DNA, 20 bp, Artificial sequence
  Synthetic oligonucleotide
acccttggttcaaaattaac

SEQ ID NO: 1206 - DNA, 20 bp, Artificial sequence
  Synthetic oligonucleotide
tagcatacacccttccactc

SEQ ID NO: 1207 - DNA, 20 bp, Artificial sequence
  Synthetic oligonucleotide
gaagacataattgatgcatc

SEQ ID NO: 1208 - DNA, 20 bp, Artificial sequence
  Synthetic oligonucleotide
tctaagttacaaaattatac

SEQ ID NO: 1209 - DNA, 20 bp, Artificial sequence
  Synthetic oligonucleotide
tggagcatttctcataaggc

SEQ ID NO: 1210 - DNA, 20 bp, Artificial sequence
  Synthetic oligonucleotide
attcgcctaatttttctctc

SEQ ID NO: 1211 - DNA, 20 bp, Artificial sequence
  Synthetic oligonucleotide
agcatatgatctattcctaa

SEQ ID NO: 1212 - DNA, 20 bp, Artificial sequence
  Synthetic oligonucleotide
ggtacttgcttacctgccct

SEQ ID NO: 1213 - DNA, 20 bp, Artificial sequence
  Synthetic oligonucleotide
ccaacacaaaatccccaaaa

SEQ ID NO: 1214 - DNA, 20 bp, Artificial sequence
  Synthetic oligonucleotide
tcaatgacccaccatgctct

SEQ ID NO: 1215 - DNA, 20 bp, Artificial sequence
  Synthetic oligonucleotide
gtctgactcatctcatccaa

SEQ ID NO: 1216 - DNA, 20 bp, Artificial sequence
  Synthetic oligonucleotide
gccagctgctaaacatgcgc

SEQ ID NO: 1217 - DNA, 20 bp, Artificial sequence
  Synthetic oligonucleotide
tgcaatttaccatctaagtc

SEQ ID NO: 1218 - DNA, 20 bp, Artificial sequence
  Synthetic oligonucleotide
cctggtgtacacatcctgta

SEQ ID NO: 1219 - DNA, 20 bp, Artificial sequence
  Synthetic oligonucleotide
atcacacatcaaacagcctc

SEQ ID NO: 1220 - DNA, 20 bp, Artificial sequence
  Synthetic oligonucleotide
gtatagtaatatttacttta

SEQ ID NO: 1221 - DNA, 20 bp, Artificial sequence
  Synthetic oligonucleotide
tttcttctattacatcatca

SEQ ID NO: 1222 - DNA, 20 bp, Artificial sequence
  Synthetic oligonucleotide
tcatttcacctttcaggact

SEQ ID NO: 1223 - DNA, 20 bp, Artificial sequence
  Synthetic oligonucleotide
gagaattacaatctccagta

SEQ ID NO: 1224 - DNA, 20 bp, Artificial sequence
  Synthetic oligonucleotide
atacgcaatttaatttcttc

SEQ ID NO: 1225 - DNA, 20 bp, Artificial sequence
  Synthetic oligonucleotide
tcttgaataattaagtagaa

SEQ ID NO: 1226 - DNA, 20 bp, Artificial sequence
  Synthetic oligonucleotide
tgcaacaccctcttccaaac

SEQ ID NO: 1227 - DNA, 20 bp, Artificial sequence
  Synthetic oligonucleotide
gaggtaataaataaattcat

SEQ ID NO: 1228 - DNA, 20 bp, Artificial sequence
  Synthetic oligonucleotide
gcagcttcctcagcttggct

SEQ ID NO: 1229 - DNA, 20 bp, Artificial sequence
  Synthetic oligonucleotide
ttattgaatctctactactt

SEQ ID NO: 1230 - DNA, 20 bp, Artificial sequence
  Synthetic oligonucleotide
tattgctgctatctgtatca

SEQ ID NO: 1231 - DNA, 20 bp, Artificial sequence
  Synthetic oligonucleotide
catccagcccacataaagtt

SEQ ID NO: 1232 - DNA, 20 bp, Artificial sequence
  Synthetic oligonucleotide
atctactacaaaattttgtc

SEQ ID NO: 1233 - DNA, 20 bp, Artificial sequence
  Synthetic oligonucleotide
agaagcataatcaaaacaaa

SEQ ID NO: 1234 - DNA, 20 bp, Artificial sequence
  Synthetic oligonucleotide
ggaagatgccaaaattgaca

SEQ ID NO: 1235 - DNA, 20 bp, Artificial sequence
  Synthetic oligonucleotide
aaagttcacaattctaggga

SEQ ID NO: 1236 - DNA, 20 bp, Artificial sequence
  Synthetic oligonucleotide
atacttgtcacttacagcta

SEQ ID NO: 1237 - DNA, 20 bp, Artificial sequence
  Synthetic oligonucleotide
tttctggtcatacaaagtcc

SEQ ID NO: 1238 - DNA, 20 bp, Artificial sequence
  Synthetic oligonucleotide
ctcttccaaactttacagac

SEQ ID NO: 1239 - DNA, 20 bp, Artificial sequence
  Synthetic oligonucleotide
ggaccttgaccaccttgggc

SEQ ID NO: 1240 - DNA, 20 bp, Artificial sequence
  Synthetic oligonucleotide
tctgccaacaacatgtgagc

SEQ ID NO: 1241 - DNA, 20 bp, Artificial sequence
  Synthetic oligonucleotide
ctagttacatttttccccct

SEQ ID NO: 1242 - DNA, 20 bp, Artificial sequence
  Synthetic oligonucleotide
gcagcctcaattcctggcct

SEQ ID NO: 1243 - DNA, 20 bp, Artificial sequence
  Synthetic oligonucleotide
aagatcagcttttaaattca

SEQ ID NO: 1244 - DNA, 20 bp, Artificial sequence
  Synthetic oligonucleotide
gtatttacaattgccagaca

SEQ ID NO: 1245 - DNA, 20 bp, Artificial sequence
  Synthetic oligonucleotide
ccagcagcctctaatcctcc

SEQ ID NO: 1246 - DNA, 20 bp, Artificial sequence
  Synthetic oligonucleotide
tttgtattcacactatgtaa

SEQ ID NO: 1247 - DNA, 20 bp, Artificial sequence
  Synthetic oligonucleotide
ccttatggcttctttggtct

SEQ ID NO: 1248 - DNA, 20 bp, Artificial sequence
  Synthetic oligonucleotide
caacattacaatctcactga

SEQ ID NO: 1249 - DNA, 20 bp, Artificial sequence
  Synthetic oligonucleotide
agatcagcttttaaattcat

SEQ ID NO: 1250 - DNA, 20 bp, Artificial sequence
  Synthetic oligonucleotide
cgcaatttaatttcttcata

SEQ ID NO: 1251 - DNA, 20 bp, Artificial sequence
  Synthetic oligonucleotide
cagctttcccctctgtgtta

SEQ ID NO: 1252 - DNA, 20 bp, Artificial sequence
  Synthetic oligonucleotide
gaggtcttaatgcatagtaa

SEQ ID NO: 1253 - DNA, 20 bp, Artificial sequence
  Synthetic oligonucleotide
gaccttgaccaccttgggca

SEQ ID NO: 1254 - DNA, 20 bp, Artificial sequence
  Synthetic oligonucleotide
ctggtgtacacatcctgtat

SEQ ID NO: 1255 - DNA, 20 bp, Artificial sequence
  Synthetic oligonucleotide
agcaaagtctccaagaggta

SEQ ID NO: 1256 - DNA, 20 bp, Artificial sequence
  Synthetic oligonucleotide
ttttctccccataacccatt

SEQ ID NO: 1257 - DNA, 20 bp, Artificial sequence
  Synthetic oligonucleotide
ggagcatttctcataaggct

SEQ ID NO: 1258 - DNA, 20 bp, Artificial sequence
  Synthetic oligonucleotide
agtctcctatcattgccatt

SEQ ID NO: 1259 - DNA, 20 bp, Artificial sequence
  Synthetic oligonucleotide
tctactacaaaattttgtca

SEQ ID NO: 1260 - DNA, 20 bp, Artificial sequence
  Synthetic oligonucleotide
tacttgtcacttacagctaa

SEQ ID NO: 1261 - DNA, 20 bp, Artificial sequence
  Synthetic oligonucleotide
gttactagcattatgcttca

SEQ ID NO: 1262 - DNA, 20 bp, Artificial sequence
  Synthetic oligonucleotide
agcagcctctaatcctcctt

SEQ ID NO: 1263 - DNA, 20 bp, Artificial sequence
  Synthetic oligonucleotide
ctctattcatctcctacaat

SEQ ID NO: 1264 - DNA, 20 bp, Artificial sequence
  Synthetic oligonucleotide
tcacttgttttttctacaat

SEQ ID NO: 1265 - DNA, 20 bp, Artificial sequence
  Synthetic oligonucleotide
ctatcagaaatacctctcat

SEQ ID NO: 1266 - DNA, 20 bp, Artificial sequence
  Synthetic oligonucleotide
aggtaataaataaattcatc

SEQ ID NO: 1267 - DNA, 20 bp, Artificial sequence
  Synthetic oligonucleotide
gcatacacccttccactctt

SEQ ID NO: 1268 - DNA, 20 bp, Artificial sequence
  Synthetic oligonucleotide
tggtaaagttttcaatccat

SEQ ID NO: 1269 - DNA, 20 bp, Artificial sequence
  Synthetic oligonucleotide
tctttagtcctaaaccacac

SEQ ID NO: 1270 - DNA, 20 bp, Artificial sequence
  Synthetic oligonucleotide
tgccaacaacatgtgagctt

SEQ ID NO: 1271 - DNA, 20 bp, Artificial sequence
  Synthetic oligonucleotide
ctccagtaaaaactactgcc

SEQ ID NO: 1272 - DNA, 20 bp, Artificial sequence
  Synthetic oligonucleotide
atcacagccctcccgagggc

SEQ ID NO: 1273 - DNA, 20 bp, Artificial sequence
  Synthetic oligonucleotide
cccatcataaaattaaatac

SEQ ID NO: 1274 - DNA, 20 bp, Artificial sequence
  Synthetic oligonucleotide
tgtcttagctatacttgcct

SEQ ID NO: 1275 - DNA, 20 bp, Artificial sequence
  Synthetic oligonucleotide
cccttggttcaaaattaaca

SEQ ID NO: 1276 - DNA, 20 bp, Artificial sequence
  Synthetic oligonucleotide
ccttagtccactctcccaca

SEQ ID NO: 1277 - DNA, 20 bp, Artificial sequence
  Synthetic oligonucleotide
gctgctatctgtatcagtca

SEQ ID NO: 1278 - DNA, 20 bp, Artificial sequence
  Synthetic oligonucleotide
ctaagttacaaaattatact

SEQ ID NO: 1279 - DNA, 20 bp, Artificial sequence
  Synthetic oligonucleotide
gctgttctaatttttagtta

SEQ ID NO: 1280 - DNA, 20 bp, Artificial sequence
  Synthetic oligonucleotide
gtttgttccatagaaacact

SEQ ID NO: 1281 - DNA, 20 bp, Artificial sequence
  Synthetic oligonucleotide
cccgacagactcatcgctcc

SEQ ID NO: 1282 - DNA, 20 bp, Artificial sequence
  Synthetic oligonucleotide
cttctattacatcatcagaa

SEQ ID NO: 1283 - DNA, 20 bp, Artificial sequence
  Synthetic oligonucleotide
tcttccaaactttacagaca

SEQ ID NO: 1284 - DNA, 20 bp, Artificial sequence
  Synthetic oligonucleotide
cacacatcaaacagcctcct

SEQ ID NO: 1285 - DNA, 20 bp, Artificial sequence
  Synthetic oligonucleotide
atacagatgctcctaactta

SEQ ID NO: 1286 - DNA, 20 bp, Artificial sequence
  Synthetic oligonucleotide
gaagcataatcaaaacaaac

SEQ ID NO: 1287 - DNA, 20 bp, Artificial sequence
  Synthetic oligonucleotide
tccttttaataattttttca

SEQ ID NO: 1288 - DNA, 20 bp, Artificial sequence
  Synthetic oligonucleotide
tgtgctttctcaatttttta

SEQ ID NO: 1289 - DNA, 20 bp, Artificial sequence
  Synthetic oligonucleotide
gtcgcctaagaacatactaa

SEQ ID NO: 1290 - DNA, 20 bp, Artificial sequence
  Synthetic oligonucleotide
aggaaattccaaactaaggg

SEQ ID NO: 1291 - DNA, 20 bp, Artificial sequence
  Synthetic oligonucleotide
tggaactttattaatacaat

SEQ ID NO: 1292 - DNA, 20 bp, Artificial sequence
  Synthetic oligonucleotide
tttcaggacttccttaagca

SEQ ID NO: 1293 - DNA, 20 bp, Artificial sequence
  Synthetic oligonucleotide
tcacagaactatttgcctta

SEQ ID NO: 1294 - DNA, 20 bp, Artificial sequence
  Synthetic oligonucleotide
ctgaagagcctccttggaac

SEQ ID NO: 1295 - DNA, 20 bp, Artificial sequence
  Synthetic oligonucleotide
ggttacagaaataaatagta

SEQ ID NO: 1296 - DNA, 20 bp, Artificial sequence
  Synthetic oligonucleotide
aagctacttttatattttct

SEQ ID NO: 1297 - DNA, 20 bp, Artificial sequence
  Synthetic oligonucleotide
agttacatttttccccctca

SEQ ID NO: 1298 - DNA, 20 bp, Artificial sequence
  Synthetic oligonucleotide
gcttacctgcccttagtgac

SEQ ID NO: 1299 - DNA, 20 bp, Artificial sequence
  Synthetic oligonucleotide
agctgggatcttcttgttta

SEQ ID NO: 1300 - DNA, 20 bp, Artificial sequence
  Synthetic oligonucleotide
cagcttttcatccatggtgt

SEQ ID NO: 1301 - DNA, 20 bp, Artificial sequence
  Synthetic oligonucleotide
agctataaacttaaggtctc

SEQ ID NO: 1302 - DNA, 20 bp, Artificial sequence
  Synthetic oligonucleotide
ccagctgctaaacatgcgcc

SEQ ID NO: 1303 - DNA, 20 bp, Artificial sequence
  Synthetic oligonucleotide
accaatcacataatccggca

SEQ ID NO: 1304 - DNA, 20 bp, Artificial sequence
  Synthetic oligonucleotide
cgggagagcaaataatgcaa

SEQ ID NO: 1305 - DNA, 20 bp, Artificial sequence
  Synthetic oligonucleotide
catgattatttctttgggaa

SEQ ID NO: 1306 - DNA, 20 bp, Artificial sequence
  Synthetic oligonucleotide
ttccacttttacatatctga

SEQ ID NO: 1307 - DNA, 20 bp, Artificial sequence
  Synthetic oligonucleotide
ctgagttccatccccagaga

SEQ ID NO: 1308 - DNA, 20 bp, Artificial sequence
  Synthetic oligonucleotide
atcatgtaccacacaggtat

SEQ ID NO: 1309 - DNA, 20 bp, Artificial sequence
  Synthetic oligonucleotide
ctaaaacttcatccctgaat

SEQ ID NO: 1310 - DNA, 20 bp, Artificial sequence
  Synthetic oligonucleotide
ttctggtcatacaaagtcct

SEQ ID NO: 1311 - DNA, 20 bp, Artificial sequence
  Synthetic oligonucleotide
tctgactcatctcatccaat

SEQ ID NO: 1312 - DNA, 20 bp, Artificial sequence
  Synthetic oligonucleotide
ctgtttatatatttattgaa

SEQ ID NO: 1313 - DNA, 20 bp, Artificial sequence
  Synthetic oligonucleotide
gcaatttaccatctaagtct

SEQ ID NO: 1314 - DNA, 20 bp, Artificial sequence
  Synthetic oligonucleotide
aacccttttttcattacctc

SEQ ID NO: 1315 - DNA, 20 bp, Artificial sequence
  Synthetic oligonucleotide
cttgaataattaagtagaaa

SEQ ID NO: 1316 - DNA, 20 bp, Artificial sequence
  Synthetic oligonucleotide
tattgaatctctactacttg

SEQ ID NO: 1317 - DNA, 20 bp, Artificial sequence
  Synthetic oligonucleotide
ttcgcctaatttttctctca

SEQ ID NO: 1318 - DNA, 20 bp, Artificial sequence
  Synthetic oligonucleotide
tatgatctattcctaagaga

SEQ ID NO: 1319 - DNA, 20 bp, Artificial sequence
  Synthetic oligonucleotide
acacaaaatccccaaaagcc

SEQ ID NO: 1320 - DNA, 20 bp, Artificial sequence
  Synthetic oligonucleotide
ggccagttctctttcattta

SEQ ID NO: 1321 - DNA, 20 bp, Artificial sequence
  Synthetic oligonucleotide
atccagcccacataaagttt

SEQ ID NO: 1322 - DNA, 20 bp, Artificial sequence
  Synthetic oligonucleotide
tgtctgtttaatctgacata

SEQ ID NO: 1323 - DNA, 20 bp, Artificial sequence
  Synthetic oligonucleotide
aactttattaatacaatgcc

SEQ ID NO: 1324 - DNA, 20 bp, Artificial sequence
  Synthetic oligonucleotide
tcattgccattttctggtcc

SEQ ID NO: 1325 - DNA, 20 bp, Artificial sequence
  Synthetic oligonucleotide
tcttgtttatctccttgcca

SEQ ID NO: 1326 - DNA, 20 bp, Artificial sequence
  Synthetic oligonucleotide
aaggaataagacctacatca

SEQ ID NO: 1327 - DNA, 20 bp, Artificial sequence
  Synthetic oligonucleotide
gtatatggtttcctaagcca

SEQ ID NO: 1328 - DNA, 20 bp, Artificial sequence
  Synthetic oligonucleotide
ctatctgtatcagtcagcta

SEQ ID NO: 1329 - DNA, 20 bp, Artificial sequence
  Synthetic oligonucleotide
cctgagcctttccctaggta

SEQ ID NO: 1330 - DNA, 20 bp, Artificial sequence
  Synthetic oligonucleotide
gtttatatatttattgaatc

SEQ ID NO: 1331 - DNA, 20 bp, Artificial sequence
  Synthetic oligonucleotide
cagctaagcatatactgata

SEQ ID NO: 1332 - DNA, 20 bp, Artificial sequence
  Synthetic oligonucleotide
tgcatagtaaaagattgcct

SEQ ID NO: 1333 - DNA, 20 bp, Artificial sequence
  Synthetic oligonucleotide
tcaaacagcctcctctggaa

SEQ ID NO: 1334 - DNA, 20 bp, Artificial sequence
  Synthetic oligonucleotide
aactgcatcataactggtga

SEQ ID NO: 1335 - DNA, 20 bp, Artificial sequence
  Synthetic oligonucleotide
taagttacaaaattatacta

SEQ ID NO: 1336 - DNA, 20 bp, Artificial sequence
  Synthetic oligonucleotide
cttagtccactctcccacat

SEQ ID NO: 1337 - DNA, 20 bp, Artificial sequence
  Synthetic oligonucleotide
ggtgtacacatcctgtataa

SEQ ID NO: 1338 - DNA, 20 bp, Artificial sequence
  Synthetic oligonucleotide
cagttctctttcatttatgc

SEQ ID NO: 1339 - DNA, 20 bp, Artificial sequence
  Synthetic oligonucleotide
atagaatatccccaacacac

SEQ ID NO: 1340 - DNA, 20 bp, Artificial sequence
  Synthetic oligonucleotide
gctgccttcaaccttttctt

SEQ ID NO: 1341 - DNA, 20 bp, Artificial sequence
  Synthetic oligonucleotide
gcctaagaacatactaattg

SEQ ID NO: 1342 - DNA, 20 bp, Artificial sequence
  Synthetic oligonucleotide
tccttggaacgaactaatcc

SEQ ID NO: 1343 - DNA, 20 bp, Artificial sequence
  Synthetic oligonucleotide
atcagaaatacctctcatta

SEQ ID NO: 1344 - DNA, 20 bp, Artificial sequence
  Synthetic oligonucleotide
tccagtaaaaactactgcct

SEQ ID NO: 1345 - DNA, 20 bp, Artificial sequence
  Synthetic oligonucleotide
gctctggctttcacacaata

SEQ ID NO: 1346 - DNA, 20 bp, Artificial sequence
  Synthetic oligonucleotide
tctattcatctcctacaatt

SEQ ID NO: 1347 - DNA, 20 bp, Artificial sequence
  Synthetic oligonucleotide
cacaaaatccccaaaagcct

SEQ ID NO: 1348 - DNA, 20 bp, Artificial sequence
  Synthetic oligonucleotide
gtcttagctatacttgcctt

SEQ ID NO: 1349 - DNA, 20 bp, Artificial sequence
  Synthetic oligonucleotide
agttccatccccagagataa

SEQ ID NO: 1350 - DNA, 20 bp, Artificial sequence
  Synthetic oligonucleotide
ccttggttcaaaattaacac

SEQ ID NO: 1351 - DNA, 20 bp, Artificial sequence
  Synthetic oligonucleotide
aataaattcatcttgtccta

SEQ ID NO: 1352 - DNA, 20 bp, Artificial sequence
  Synthetic oligonucleotide
gttatgtaacattaacatac

SEQ ID NO: 1353 - DNA, 20 bp, Artificial sequence
  Synthetic oligonucleotide
gactgactccttgactgctt

SEQ ID NO: 1354 - DNA, 20 bp, Artificial sequence
  Synthetic oligonucleotide
atagcaattcctgacagctt

SEQ ID NO: 1355 - DNA, 20 bp, Artificial sequence
  Synthetic oligonucleotide
cagatgctcctaacttacaa

SEQ ID NO: 1356 - DNA, 20 bp, Artificial sequence
  Synthetic oligonucleotide
tggacctctcctctcaacaa

SEQ ID NO: 1357 - DNA, 20 bp, Artificial sequence
  Synthetic oligonucleotide
gggagagcaaataatgcaat

SEQ ID NO: 1358 - DNA, 20 bp, Artificial sequence
  Synthetic oligonucleotide
gactcatctcatccaatgca

SEQ ID NO: 1359 - DNA, 20 bp, Artificial sequence
  Synthetic oligonucleotide
agctacttttatattttctt

SEQ ID NO: 1360 - DNA, 20 bp, Artificial sequence
  Synthetic oligonucleotide
cacttttacatatctgaggc

SEQ ID NO: 1361 - DNA, 20 bp, Artificial sequence
  Synthetic oligonucleotide
ctagcattatgcttcagcca

SEQ ID NO: 1362 - DNA, 20 bp, Artificial sequence
  Synthetic oligonucleotide
acatcatcagaaaccacaaa

SEQ ID NO: 1363 - DNA, 20 bp, Artificial sequence
  Synthetic oligonucleotide
cacttgttttttctacaatt

SEQ ID NO: 1364 - DNA, 20 bp, Artificial sequence
  Synthetic oligonucleotide
gctttctcaattttttatgt

SEQ ID NO: 1365 - DNA, 20 bp, Artificial sequence
  Synthetic oligonucleotide
cagctgctaaacatgcgcca

SEQ ID NO: 1366 - DNA, 20 bp, Artificial sequence
  Synthetic oligonucleotide
cgcctaatttttctctcaca

SEQ ID NO: 1367 - DNA, 20 bp, Artificial sequence
  Synthetic oligonucleotide
ttcaggacttccttaagcat

SEQ ID NO: 1368 - DNA, 20 bp, Artificial sequence
  Synthetic oligonucleotide
gatcagcttttaaattcatt

SEQ ID NO: 1369 - DNA, 20 bp, Artificial sequence
  Synthetic oligonucleotide
gtaaagttttcaatccattt

SEQ ID NO: 1370 - DNA, 20 bp, Artificial sequence
  Synthetic oligonucleotide
acagtggctttcaaagataa

SEQ ID NO: 1371 - DNA, 20 bp, Artificial sequence
  Synthetic oligonucleotide
gagcatttctcataaggctg

SEQ ID NO: 1372 - DNA, 20 bp, Artificial sequence
  Synthetic oligonucleotide
acatttttccccctcagttc

SEQ ID NO: 1373 - DNA, 20 bp, Artificial sequence
  Synthetic oligonucleotide
ctttagtcctaaaccacaca

SEQ ID NO: 1374 - DNA, 20 bp, Artificial sequence
  Synthetic oligonucleotide
ctgtagttcttcacttgttt

SEQ ID NO: 1375 - DNA, 20 bp, Artificial sequence
  Synthetic oligonucleotide
tgcaatagactccagagttc

SEQ ID NO: 1376 - DNA, 20 bp, Artificial sequence
  Synthetic oligonucleotide
tgaatctctactacttgtcc

SEQ ID NO: 1377 - DNA, 20 bp, Artificial sequence
  Synthetic oligonucleotide
ttctttggtctctttagccc

SEQ ID NO: 1378 - DNA, 20 bp, Artificial sequence
  Synthetic oligonucleotide
actgagataactttcaggat

SEQ ID NO: 1379 - DNA, 20 bp, Artificial sequence
  Synthetic oligonucleotide
acagaaataaatagtatcca

SEQ ID NO: 1380 - DNA, 20 bp, Artificial sequence
  Synthetic oligonucleotide
cggttatgtccttctacaat

SEQ ID NO: 1381 - DNA, 20 bp, Artificial sequence
  Synthetic oligonucleotide
ctccccataacccatttttc

SEQ ID NO: 1382 - DNA, 20 bp, Artificial sequence
  Synthetic oligonucleotide
aggaagagacatcaacactc

SEQ ID NO: 1383 - DNA, 20 bp, Artificial sequence
  Synthetic oligonucleotide
acttgctcaaattcacaaaa

SEQ ID NO: 1384 - DNA, 20 bp, Artificial sequence
  Synthetic oligonucleotide
gcaaagtctccaagaggtaa

SEQ ID NO: 1385 - DNA, 20 bp, Artificial sequence
  Synthetic oligonucleotide
actgagacaattcatgtaca

SEQ ID NO: 1386 - DNA, 20 bp, Artificial sequence
  Synthetic oligonucleotide
acccttttttcattacctcc

SEQ ID NO: 1387 - DNA, 20 bp, Artificial sequence
  Synthetic oligonucleotide
accttgggcacatgtggcca

SEQ ID NO: 1388 - DNA, 20 bp, Artificial sequence
  Synthetic oligonucleotide
gcctctaatcctccttggac

SEQ ID NO: 1389 - DNA, 20 bp, Artificial sequence
  Synthetic oligonucleotide
ccgacagactcatcgctcct

SEQ ID NO: 1390 - DNA, 20 bp, Artificial sequence
  Synthetic oligonucleotide
ccatcataaaattaaatact

SEQ ID NO: 1391 - DNA, 20 bp, Artificial sequence
  Synthetic oligonucleotide
aacttcatccctgaatagaa

SEQ ID NO: 1392 - DNA, 20 bp, Artificial sequence
  Synthetic oligonucleotide
tggtaaccaaactcaaagtt

SEQ ID NO: 1393 - DNA, 20 bp, Artificial sequence
  Synthetic oligonucleotide
attttgtcaaaaccactaaa

SEQ ID NO: 1394 - DNA, 20 bp, Artificial sequence
  Synthetic oligonucleotide
ataatcaaaacaaactgggc

SEQ ID NO: 1395 - DNA, 20 bp, Artificial sequence
  Synthetic oligonucleotide
aactatttgccttactgcct

SEQ ID NO: 1396 - DNA, 20 bp, Artificial sequence
  Synthetic oligonucleotide
tccagcccacataaagttta

SEQ ID NO: 1397 - DNA, 20 bp, Artificial sequence
  Synthetic oligonucleotide
acacccttccactctttttc

SEQ ID NO: 1398 - DNA, 20 bp, Artificial sequence
  Synthetic oligonucleotide
gcaatttaatttcttcataa

SEQ ID NO: 1399 - DNA, 20 bp, Artificial sequence
  Synthetic oligonucleotide
atgatctattcctaagagaa

SEQ ID NO: 1400 - DNA, 20 bp, Artificial sequence
  Synthetic oligonucleotide
tttagtcctaaaccacacaa

SEQ ID NO: 1401 - DNA, 20 bp, Artificial sequence
  Synthetic oligonucleotide
acttgtccagcaatgtgcta

SEQ ID NO: 1402 - DNA, 20 bp, Artificial sequence
  Synthetic oligonucleotide
ctttctcaattttttatgtt

SEQ ID NO: 1403 - DNA, 20 bp, Artificial sequence
  Synthetic oligonucleotide
actcatctcatccaatgcaa

SEQ ID NO: 1404 - DNA, 20 bp, Artificial sequence
  Synthetic oligonucleotide
ctattcatctcctacaattt

SEQ ID NO: 1405 - DNA, 20 bp, Artificial sequence
  Synthetic oligonucleotide
acaaaatccccaaaagccta

SEQ ID NO: 1406 - DNA, 20 bp, Artificial sequence
  Synthetic oligonucleotide
ttcttcataaacattcagct

SEQ ID NO: 1407 - DNA, 20 bp, Artificial sequence
  Synthetic oligonucleotide
ttcagccaaatccccaagga

SEQ ID NO: 1408 - DNA, 20 bp, Artificial sequence
  Synthetic oligonucleotide
acttgttttttctacaatta

SEQ ID NO: 1409 - DNA, 20 bp, Artificial sequence
  Synthetic oligonucleotide
gctagactgatcttaaactc

SEQ ID NO: 1410 - DNA, 20 bp, Artificial sequence
  Synthetic oligonucleotide
ggttatgtccttctacaatt

SEQ ID NO: 1411 - DNA, 20 bp, Artificial sequence
  Synthetic oligonucleotide
aactttttccatcccttcaa

SEQ ID NO: 1412 - DNA, 20 bp, Artificial sequence
  Synthetic oligonucleotide
actgactccttgactgctta

SEQ ID NO: 1413 - DNA, 20 bp, Artificial sequence
  Synthetic oligonucleotide
aaactgtatttctccctcat

SEQ ID NO: 1414 - DNA, 20 bp, Artificial sequence
  Synthetic oligonucleotide
ttggaacgaactaatcctga

SEQ ID NO: 1415 - DNA, 20 bp, Artificial sequence
  Synthetic oligonucleotide
agttctctttcatttatgca

SEQ ID NO: 1416 - DNA, 20 bp, Artificial sequence
  Synthetic oligonucleotide
ttcacttgttttactttcgc

SEQ ID NO: 1417 - DNA, 20 bp, Artificial sequence
  Synthetic oligonucleotide
tcagcttttaaattcattta

SEQ ID NO: 1418 - DNA, 20 bp, Artificial sequence
  Synthetic oligonucleotide
gtacagtgactttctaattt

SEQ ID NO: 1419 - DNA, 20 bp, Artificial sequence
  Synthetic oligonucleotide
ttgctcaaattcacaaaacc

SEQ ID NO: 1420 - DNA, 20 bp, Artificial sequence
  Synthetic oligonucleotide
gataaagtcttttattagca

SEQ ID NO: 1421 - DNA, 20 bp, Artificial sequence
  Synthetic oligonucleotide
aacatgcgccagcataccaa

SEQ ID NO: 1422 - DNA, 20 bp, Artificial sequence
  Synthetic oligonucleotide
ctggtgatatcaccctggat

SEQ ID NO: 1423 - DNA, 20 bp, Artificial sequence
  Synthetic oligonucleotide
catcataaaattaaatacta

SEQ ID NO: 1424 - DNA, 20 bp, Artificial sequence
  Synthetic oligonucleotide
tcatcttgtcctaattattt

SEQ ID NO: 1425 - DNA, 20 bp, Artificial sequence
  Synthetic oligonucleotide
aaagttttcaatccatttta

SEQ ID NO: 1426 - DNA, 20 bp, Artificial sequence
  Synthetic oligonucleotide
gccttcaaccttttcttcca

SEQ ID NO: 1427 - DNA, 20 bp, Artificial sequence
  Synthetic oligonucleotide
agctaagcatatactgataa

SEQ ID NO: 1428 - DNA, 20 bp, Artificial sequence
  Synthetic oligonucleotide
ctatcgccagaataatgtct

SEQ ID NO: 1429 - DNA, 20 bp, Artificial sequence
  Synthetic oligonucleotide
ggaagagacatcaacactcc

SEQ ID NO: 1430 - DNA, 20 bp, Artificial sequence
  Synthetic oligonucleotide
gtcccaagacttcttgcata

SEQ ID NO: 1431 - DNA, 20 bp, Artificial sequence
  Synthetic oligonucleotide
cctctaatcctccttggacc

SEQ ID NO: 1432 - DNA, 20 bp, Artificial sequence
  Synthetic oligonucleotide
cctaagagaattctaattga

SEQ ID NO: 1433 - DNA, 20 bp, Artificial sequence
  Synthetic oligonucleotide
tccccataacccatttttcc

SEQ ID NO: 1434 - DNA, 20 bp, Artificial sequence
  Synthetic oligonucleotide
tttgtcaaaaccactaaagt

SEQ ID NO: 1435 - DNA, 20 bp, Artificial sequence
  Synthetic oligonucleotide
ctctttagcccctattcacc

SEQ ID NO: 1436 - DNA, 20 bp, Artificial sequence
  Synthetic oligonucleotide
gattcagtaacaataggctc

SEQ ID NO: 1437 - DNA, 20 bp, Artificial sequence
  Synthetic oligonucleotide
actttattaatacaatgcca

SEQ ID NO: 1438 - DNA, 20 bp, Artificial sequence
  Synthetic oligonucleotide
atatggtttcctaagccaac

SEQ ID NO: 1439 - DNA, 20 bp, Artificial sequence
  Synthetic oligonucleotide
gctacttttatattttctta

SEQ ID NO: 1440 - DNA, 20 bp, Artificial sequence
  Synthetic oligonucleotide
ctaagaacatactaattgcc

SEQ ID NO: 1441 - DNA, 20 bp, Artificial sequence
  Synthetic oligonucleotide
cataaagtttaaaaatttcc

SEQ ID NO: 1442 - DNA, 20 bp, Artificial sequence
  Synthetic oligonucleotide
tgctcctaacttacaatgga

SEQ ID NO: 1443 - DNA, 20 bp, Artificial sequence
  Synthetic oligonucleotide
gtgcaggtacatatatgaat

SEQ ID NO: 1444 - DNA, 20 bp, Artificial sequence
  Synthetic oligonucleotide
ctcctgttccacctcaggat

SEQ ID NO: 1445 - DNA, 20 bp, Artificial sequence
  Synthetic oligonucleotide
aggtttgtctgatctacaga

SEQ ID NO: 1446 - DNA, 20 bp, Artificial sequence
  Synthetic oligonucleotide
cccttttttcattacctccc

SEQ ID NO: 1447 - DNA, 20 bp, Artificial sequence
  Synthetic oligonucleotide
catttttccccctcagttca

SEQ ID NO: 1448 - DNA, 20 bp, Artificial sequence
  Synthetic oligonucleotide
aagttacaaaattatactat

SEQ ID NO: 1449 - DNA, 20 bp, Artificial sequence
  Synthetic oligonucleotide
gcctaatttttctctcacat

SEQ ID NO: 1450 - DNA, 20 bp, Artificial sequence
  Synthetic oligonucleotide
tgccagtacaattcttgtct

SEQ ID NO: 1451 - DNA, 20 bp, Artificial sequence
  Synthetic oligonucleotide
cagaaatacctctcattatc

SEQ ID NO: 1452 - DNA, 20 bp, Artificial sequence
  Synthetic oligonucleotide
tctggctttcacacaatata

SEQ ID NO: 1453 - DNA, 20 bp, Artificial sequence
  Synthetic oligonucleotide
tgcaatacaaattccaacta

SEQ ID NO: 1454 - DNA, 20 bp, Artificial sequence
  Synthetic oligonucleotide
gtaaccaaactcaaagttca

SEQ ID NO: 1455 - DNA, 20 bp, Artificial sequence
  Synthetic oligonucleotide
tccactctttttcaatgcat

SEQ ID NO: 1456 - DNA, 20 bp, Artificial sequence
  Synthetic oligonucleotide
tgcctttgctctctctactc

SEQ ID NO: 1457 - DNA, 20 bp, Artificial sequence
  Synthetic oligonucleotide
aactactgccttaccttgta

SEQ ID NO: 1458 - DNA, 20 bp, Artificial sequence
  Synthetic oligonucleotide
taatcaaaacaaactgggca

SEQ ID NO: 1459 - DNA, 20 bp, Artificial sequence
  Synthetic oligonucleotide
cttggttcaaaattaacact

SEQ ID NO: 1460 - DNA, 20 bp, Artificial sequence
  Synthetic oligonucleotide
acttcactttaaacccttcc

SEQ ID NO: 1461 - DNA, 20 bp, Artificial sequence
  Synthetic oligonucleotide
ctgagataactttcaggatc

SEQ ID NO: 1462 - DNA, 20 bp, Artificial sequence
  Synthetic oligonucleotide
tggacatttaatctaatata

SEQ ID NO: 1463 - DNA, 20 bp, Artificial sequence
  Synthetic oligonucleotide
cttgtttatctccttgccat

SEQ ID NO: 1464 - DNA, 20 bp, Artificial sequence
  Synthetic oligonucleotide
ggacctctcctctcaacaaa

SEQ ID NO: 1465 - DNA, 20 bp, Artificial sequence
  Synthetic oligonucleotide
actaagtcttagatttgtca

SEQ ID NO: 1466 - DNA, 20 bp, Artificial sequence
  Synthetic oligonucleotide
atagtatccacactcaggaa

SEQ ID NO: 1467 - DNA, 20 bp, Artificial sequence
  Synthetic oligonucleotide
cctggctttaatcctaaacc

SEQ ID NO: 1468 - DNA, 20 bp, Artificial sequence
  Synthetic oligonucleotide
atagaatacatcacatcccc

SEQ ID NO: 1469 - DNA, 20 bp, Artificial sequence
  Synthetic oligonucleotide
cacatcctgtataatcccct

SEQ ID NO: 1470 - DNA, 20 bp, Artificial sequence
  Synthetic oligonucleotide
acttttacatatctgaggcc

SEQ ID NO: 1471 - DNA, 20 bp, Artificial sequence
  Synthetic oligonucleotide
actatttgccttactgcctt

SEQ ID NO: 1472 - DNA, 20 bp, Artificial sequence
  Synthetic oligonucleotide
ttagtccactctcccacata

SEQ ID NO: 1473 - DNA, 20 bp, Artificial sequence
  Synthetic oligonucleotide
ggccaggacctcttgaggct

SEQ ID NO: 1474 - DNA, 20 bp, Artificial sequence
  Synthetic oligonucleotide
tcaggacttccttaagcatt

SEQ ID NO: 1475 - DNA, 20 bp, Artificial sequence
  Synthetic oligonucleotide
ttcatgtacaatacttagca

SEQ ID NO: 1476 - DNA, 20 bp, Artificial sequence
  Synthetic oligonucleotide
acaaaacatcttccttacct

SEQ ID NO: 1477 - DNA, 20 bp, Artificial sequence
  Synthetic oligonucleotide
ctggctttcacacaatatac

SEQ ID NO: 1478 - DNA, 20 bp, Artificial sequence
  Synthetic oligonucleotide
ccttcaaccttttcttccac

SEQ ID NO: 1479 - DNA, 20 bp, Artificial sequence
  Synthetic oligonucleotide
tcatgtacaatacttagcat

SEQ ID NO: 1480 - DNA, 20 bp, Artificial sequence
  Synthetic oligonucleotide
aatcctggcatttcctccca

SEQ ID NO: 1481 - DNA, 20 bp, Artificial sequence
  Synthetic oligonucleotide
gaaatacctctcattatcta

SEQ ID NO: 1482 - DNA, 20 bp, Artificial sequence
  Synthetic oligonucleotide
ctctaatcctccttggacca

SEQ ID NO: 1483 - DNA, 20 bp, Artificial sequence
  Synthetic oligonucleotide
gcaaaaggaaatttatggaa

SEQ ID NO: 1484 - DNA, 20 bp, Artificial sequence
  Synthetic oligonucleotide
tttgtctgatctacagacat

SEQ ID NO: 1485 - DNA, 20 bp, Artificial sequence
  Synthetic oligonucleotide
cttgaccttaattattggaa

SEQ ID NO: 1486 - DNA, 20 bp, Artificial sequence
  Synthetic oligonucleotide
actgtatttctccctcattc

SEQ ID NO: 1487 - DNA, 20 bp, Artificial sequence
  Synthetic oligonucleotide
taccttgtatttcagtatca

SEQ ID NO: 1488 - DNA, 20 bp, Artificial sequence
  Synthetic oligonucleotide
tctcctctcaacaaatggca

SEQ ID NO: 1489 - DNA, 20 bp, Artificial sequence
  Synthetic oligonucleotide
gctagacgagaagccagcct

SEQ ID NO: 1490 - DNA, 20 bp, Artificial sequence
  Synthetic oligonucleotide
tgctcaaattcacaaaaccc

SEQ ID NO: 1491 - DNA, 20 bp, Artificial sequence
  Synthetic oligonucleotide
tctttagcccctattcacct

SEQ ID NO: 1492 - DNA, 20 bp, Artificial sequence
  Synthetic oligonucleotide
ggtgatatcaccctggatca

SEQ ID NO: 1493 - DNA, 20 bp, Artificial sequence
  Synthetic oligonucleotide
attcagtaacaataggctca

SEQ ID NO: 1494 - DNA, 20 bp, Artificial sequence
  Synthetic oligonucleotide
tagaatacatcacatcccct

SEQ ID NO: 1495 - DNA, 20 bp, Artificial sequence
  Synthetic oligonucleotide
atgtatgtatacacaatgtg

SEQ ID NO: 1496 - DNA, 20 bp, Artificial sequence
  Synthetic oligonucleotide
gctggcattaaaaatacctt

SEQ ID NO: 1497 - DNA, 20 bp, Artificial sequence
  Synthetic oligonucleotide
tgcgccagcataccaatgga

SEQ ID NO: 1498 - DNA, 20 bp, Artificial sequence
  Synthetic oligonucleotide
ttagtcctaaaccacacaac

SEQ ID NO: 1499 - DNA, 20 bp, Artificial sequence
  Synthetic oligonucleotide
ccttttttcattacctcccc

SEQ ID NO: 1500 - DNA, 20 bp, Artificial sequence
  Synthetic oligonucleotide
gtccagcaatgtgctaggta

SEQ ID NO: 1501 - DNA, 20 bp, Artificial sequence
  Synthetic oligonucleotide
gccaaatccccaaggaagga

SEQ ID NO: 1502 - DNA, 20 bp, Artificial sequence
  Synthetic oligonucleotide
caggacttccttaagcattt

SEQ ID NO: 1503 - DNA, 20 bp, Artificial sequence
  Synthetic oligonucleotide
tcacttgttttactttcgct

SEQ ID NO: 1504 - DNA, 20 bp, Artificial sequence
  Synthetic oligonucleotide
aatgcatttataattttggt

SEQ ID NO: 1505 - DNA, 20 bp, Artificial sequence
  Synthetic oligonucleotide
tcccaagacttcttgcatac

SEQ ID NO: 1506 - DNA, 20 bp, Artificial sequence
  Synthetic oligonucleotide
tcctgtataatcccctcctc

SEQ ID NO: 1507 - DNA, 20 bp, Artificial sequence
  Synthetic oligonucleotide
acagtgactttctaattttc

SEQ ID NO: 1508 - DNA, 20 bp, Artificial sequence
  Synthetic oligonucleotide
gtttcctaagccaacaggta

SEQ ID NO: 1509 - DNA, 20 bp, Artificial sequence
  Synthetic oligonucleotide
ttctcaattttttatgttca

SEQ ID NO: 1510 - DNA, 20 bp, Artificial sequence
  Synthetic oligonucleotide
cagaagagccagctaagcca

SEQ ID NO: 1511 - DNA, 20 bp, Artificial sequence
  Synthetic oligonucleotide
gaagagacatcaacactcca

SEQ ID NO: 1512 - DNA, 20 bp, Artificial sequence
  Synthetic oligonucleotide
tgcaggtacatatatgaata

SEQ ID NO: 1513 - DNA, 20 bp, Artificial sequence
  Synthetic oligonucleotide
tagtatccacactcaggaaa

SEQ ID NO: 1514 - DNA, 20 bp, Artificial sequence
  Synthetic oligonucleotide
aaaacatcttccttacctgt

SEQ ID NO: 1515 - DNA, 20 bp, Artificial sequence
  Synthetic oligonucleotide
catgaatgcatccttaacct

SEQ ID NO: 1516 - DNA, 20 bp, Artificial sequence
  Synthetic oligonucleotide
gacaggctttttcatgattt

SEQ ID NO: 1517 - DNA, 20 bp, Artificial sequence
  Synthetic oligonucleotide
taagaacatactaattgcct

SEQ ID NO: 1518 - DNA, 20 bp, Artificial sequence
  Synthetic oligonucleotide
ctttattaatacaatgccaa

SEQ ID NO: 1519 - DNA, 20 bp, Artificial sequence
  Synthetic oligonucleotide
gccttactgccttcctgccc

SEQ ID NO: 1520 - DNA, 20 bp, Artificial sequence
  Synthetic oligonucleotide
gaagaatgctttccaatggt

SEQ ID NO: 1521 - DNA, 20 bp, Artificial sequence
  Synthetic oligonucleotide
gcctttgctctctctactcc

SEQ ID NO: 1522 - DNA, 20 bp, Artificial sequence
  Synthetic oligonucleotide
agttacaaaattatactata

SEQ ID NO: 1523 - DNA, 20 bp, Artificial sequence
  Synthetic oligonucleotide
tcttcataaacattcagctt

SEQ ID NO: 1524 - DNA, 20 bp, Artificial sequence
  Synthetic oligonucleotide
tagctttgtctttacagccc

SEQ ID NO: 1525 - DNA, 20 bp, Artificial sequence
  Synthetic oligonucleotide
tagtccactctcccacatac

SEQ ID NO: 1526 - DNA, 20 bp, Artificial sequence
  Synthetic oligonucleotide
ttctctttcatttatgcagc

SEQ ID NO: 1527 - DNA, 20 bp, Artificial sequence
  Synthetic oligonucleotide
tcatatgcaataattagctc

SEQ ID NO: 1528 - DNA, 20 bp, Artificial sequence
  Synthetic oligonucleotide
gttatgtccttctacaattc

SEQ ID NO: 1529 - DNA, 20 bp, Artificial sequence
  Synthetic oligonucleotide
tccattttaactaattaatc

SEQ ID NO: 1530 - DNA, 20 bp, Artificial sequence
  Synthetic oligonucleotide
gccagtacaattcttgtcta

SEQ ID NO: 1531 - DNA, 20 bp, Artificial sequence
  Synthetic oligonucleotide
attcatctcctacaattttc

SEQ ID NO: 1532 - DNA, 20 bp, Artificial sequence
  Synthetic oligonucleotide
aagggcaaacagtttagttc

SEQ ID NO: 1533 - DNA, 20 bp, Artificial sequence
  Synthetic oligonucleotide
tccccaaaagcctacaggac

SEQ ID NO: 1534 - DNA, 20 bp, Artificial sequence
  Synthetic oligonucleotide
ctggctttaatcctaaacca

SEQ ID NO: 1535 - DNA, 20 bp, Artificial sequence
  Synthetic oligonucleotide
actttttccatcccttcaat

SEQ ID NO: 1536 - DNA, 20 bp, Artificial sequence
  Synthetic oligonucleotide
gcaatacaaattccaactat

SEQ ID NO: 1537 - DNA, 20 bp, Artificial sequence
  Synthetic oligonucleotide
ccccataacccatttttcct

SEQ ID NO: 1538 - DNA, 20 bp, Artificial sequence
  Synthetic oligonucleotide
gttttttctacaattaagta

SEQ ID NO: 1539 - DNA, 20 bp, Artificial sequence
  Synthetic oligonucleotide
catgtagaacataatgcaga

SEQ ID NO: 1540 - DNA, 20 bp, Artificial sequence
  Synthetic oligonucleotide
ataaagtcttttattagcag

SEQ ID NO: 1541 - DNA, 20 bp, Artificial sequence
  Synthetic oligonucleotide
cagcttttaaattcatttat

SEQ ID NO: 1542 - DNA, 20 bp, Artificial sequence
  Synthetic oligonucleotide
gcccggccaatttagcagat

SEQ ID NO: 1543 - DNA, 20 bp, Artificial sequence
  Synthetic oligonucleotide
tcctgttccacctcaggata

SEQ ID NO: 1544 - DNA, 20 bp, Artificial sequence
  Synthetic oligonucleotide
gctcctaacttacaatggaa

SEQ ID NO: 1545 - DNA, 20 bp, Artificial sequence
  Synthetic oligonucleotide
ttgtcaaaaccactaaagta

SEQ ID NO: 1546 - DNA, 20 bp, Artificial sequence
  Synthetic oligonucleotide
catcttgtcctaattatttt

SEQ ID NO: 1547 - DNA, 20 bp, Artificial sequence
  Synthetic oligonucleotide
ttggttcaaaattaacacta

SEQ ID NO: 1548 - DNA, 20 bp, Artificial sequence
  Synthetic oligonucleotide
cctaatttttctctcacatc

SEQ ID NO: 1549 - DNA, 20 bp, Artificial sequence
  Synthetic oligonucleotide
taagagaattctaattgatt

SEQ ID NO: 1550 - DNA, 20 bp, Artificial sequence
  Synthetic oligonucleotide
atcgccagaataatgtctaa

SEQ ID NO: 1551 - DNA, 20 bp, Artificial sequence
  Synthetic oligonucleotide
ataaagtttaaaaatttccc

SEQ ID NO: 1552 - DNA, 20 bp, Artificial sequence
  Synthetic oligonucleotide
tgagctgtaaacttaaggtc

SEQ ID NO: 1553 - DNA, 20 bp, Artificial sequence
  Synthetic oligonucleotide
ccactctttttcaatgcata

SEQ ID NO: 1554 - DNA, 20 bp, Artificial sequence
  Synthetic oligonucleotide
ttaagcatttctcgcagggc

SEQ ID NO: 1555 - DNA, 20 bp, Artificial sequence
  Synthetic oligonucleotide
tgttcagtctaacattggcc

SEQ ID NO: 1556 - DNA, 20 bp, Artificial sequence
  Synthetic oligonucleotide
actaatgtaatatttacttc

SEQ ID NO: 1557 - DNA, 20 bp, Artificial sequence
  Synthetic oligonucleotide
gatttgagaacttttaccta

SEQ ID NO: 1558 - DNA, 20 bp, Artificial sequence
  Synthetic oligonucleotide
aggataaaaagactcagcca

SEQ ID NO: 1559 - DNA, 20 bp, Artificial sequence
  Synthetic oligonucleotide
ccctggatcaccacctgggt

SEQ ID NO: 1560 - DNA, 20 bp, Artificial sequence
  Synthetic oligonucleotide
caaaaggaaatttatggaat

SEQ ID NO: 1561 - DNA, 20 bp, Artificial sequence
  Synthetic oligonucleotide
aagcttgtatttcagtatca

SEQ ID NO: 1562 - DNA, 20 bp, Artificial sequence
  Synthetic oligonucleotide
tgtggaatacattttattcc

SEQ ID NO: 1563 - DNA, 20 bp, Artificial sequence
  Synthetic oligonucleotide
catcttccttacctgtggtc

SEQ ID NO: 1564 - DNA, 20 bp, Artificial sequence
  Synthetic oligonucleotide
gaatacatcacatcccctta

SEQ ID NO: 1565 - DNA, 20 bp, Artificial sequence
  Synthetic oligonucleotide
tttttctctcacatcgatta

SEQ ID NO: 1566 - DNA, 20 bp, Artificial sequence
  Synthetic oligonucleotide
gctcaaattcacaaaaccca

SEQ ID NO: 1567 - DNA, 20 bp, Artificial sequence
  Synthetic oligonucleotide
gtatgtatacacaatgtgtg

SEQ ID NO: 1568 - DNA, 20 bp, Artificial sequence
  Synthetic oligonucleotide
actttcgctttcatcttcat

SEQ ID NO: 1569 - DNA, 20 bp, Artificial sequence
  Synthetic oligonucleotide
aagttgatttcagaccggtc

SEQ ID NO: 1570 - DNA, 20 bp, Artificial sequence
  Synthetic oligonucleotide
acaaatggcattccaaagtt

SEQ ID NO: 1571 - DNA, 20 bp, Artificial sequence
  Synthetic oligonucleotide
tagtcctaaaccacacaaca

SEQ ID NO: 1572 - DNA, 20 bp, Artificial sequence
  Synthetic oligonucleotide
aagtatggaatttaatccat

SEQ ID NO: 1573 - DNA, 20 bp, Artificial sequence
  Synthetic oligonucleotide
ttttcaatgcatataagcca

SEQ ID NO: 1574 - DNA, 20 bp, Artificial sequence
  Synthetic oligonucleotide
ctgtatttctccctcattcc

SEQ ID NO: 1575 - DNA, 20 bp, Artificial sequence
  Synthetic oligonucleotide
cttttttcattacctcccca

SEQ ID NO: 1576 - DNA, 20 bp, Artificial sequence
  Synthetic oligonucleotide
gtatttgtaaaaactgcttc

SEQ ID NO: 1577 - DNA, 20 bp, Artificial sequence
  Synthetic oligonucleotide
gtccactctcccacatacca

SEQ ID NO: 1578 - DNA, 20 bp, Artificial sequence
  Synthetic oligonucleotide
cagctgctttacctgtgttc

SEQ ID NO: 1579 - DNA, 20 bp, Artificial sequence
  Synthetic oligonucleotide
ttggaggaaaacaaacaact

SEQ ID NO: 1580 - DNA, 20 bp, Artificial sequence
  Synthetic oligonucleotide
tggttcaaaattaacactaa

SEQ ID NO: 1581 - DNA, 20 bp, Artificial sequence
  Synthetic oligonucleotide
attttaactaattaatccat

SEQ ID NO: 1582 - DNA, 20 bp, Artificial sequence
  Synthetic oligonucleotide
cctttgctctctctactcct

SEQ ID NO: 1583 - DNA, 20 bp, Artificial sequence
  Synthetic oligonucleotide
ttcatctcctacaattttcc

SEQ ID NO: 1584 - DNA, 20 bp, Artificial sequence
  Synthetic oligonucleotide
ataatcccctcctcttgagc

SEQ ID NO: 1585 - DNA, 20 bp, Artificial sequence
  Synthetic oligonucleotide
acttcttgcatacactatct

SEQ ID NO: 1586 - DNA, 20 bp, Artificial sequence
  Synthetic oligonucleotide
cttttaaattcatttatggt

SEQ ID NO: 1587 - DNA, 20 bp, Artificial sequence
  Synthetic oligonucleotide
ctggcattaaaaatacctta

SEQ ID NO: 1588 - DNA, 20 bp, Artificial sequence
  Synthetic oligonucleotide
aagaacatactaattgcctt

SEQ ID NO: 1589 - DNA, 20 bp, Artificial sequence
  Synthetic oligonucleotide
agctgtaaacttaaggtctt

SEQ ID NO: 1590 - DNA, 20 bp, Artificial sequence
  Synthetic oligonucleotide
catgtacaatacttagcata

SEQ ID NO: 1591 - DNA, 20 bp, Artificial sequence
  Synthetic oligonucleotide
agctttgtctttacagcccc

SEQ ID NO: 1592 - DNA, 20 bp, Artificial sequence
  Synthetic oligonucleotide
agagtggaatgcaactgcct

SEQ ID NO: 1593 - DNA, 20 bp, Artificial sequence
  Synthetic oligonucleotide
ctctttcatttatgcagcgc

SEQ ID NO: 1594 - DNA, 20 bp, Artificial sequence
  Synthetic oligonucleotide
tgatgtcgacctctactttt

SEQ ID NO: 1595 - DNA, 20 bp, Artificial sequence
  Synthetic oligonucleotide
atctacagacatctgaaaac

SEQ ID NO: 1596 - DNA, 20 bp, Artificial sequence
  Synthetic oligonucleotide
gttacaaaattatactatac

SEQ ID NO: 1597 - DNA, 20 bp, Artificial sequence
  Synthetic oligonucleotide
ttaagtaatatcaaatggta

SEQ ID NO: 1598 - DNA, 20 bp, Artificial sequence
  Synthetic oligonucleotide
acaatgccaaaaccttcatt

SEQ ID NO: 1599 - DNA, 20 bp, Artificial sequence
  Synthetic oligonucleotide
cagtgactttctaattttcc

SEQ ID NO: 1600 - DNA, 20 bp, Artificial sequence
  Synthetic oligonucleotide
atacctctcattatctattt

SEQ ID NO: 1601 - DNA, 20 bp, Artificial sequence
  Synthetic oligonucleotide
tggctttaatcctaaaccat

SEQ ID NO: 1602 - DNA, 20 bp, Artificial sequence
  Synthetic oligonucleotide
atgtccttctacaattcagt

SEQ ID NO: 1603 - DNA, 20 bp, Artificial sequence
  Synthetic oligonucleotide
ccttactgccttcctgcccc

SEQ ID NO: 1604 - DNA, 20 bp, Artificial sequence
  Synthetic oligonucleotide
atttggtactagtaatattc

SEQ ID NO: 1605 - DNA, 20 bp, Artificial sequence
  Synthetic oligonucleotide
ttcatgattttacacatgga

SEQ ID NO: 1606 - DNA, 20 bp, Artificial sequence
  Synthetic oligonucleotide
atcttgtcctaattatttta

SEQ ID NO: 1607 - DNA, 20 bp, Artificial sequence
  Synthetic oligonucleotide
gctcacagaccacctggact

SEQ ID NO: 1608 - DNA, 20 bp, Artificial sequence
  Synthetic oligonucleotide
ctcaggaaactcacaaacaa

SEQ ID NO: 1609 - DNA, 20 bp, Artificial sequence
  Synthetic oligonucleotide
ctggcatttcctcccattct

SEQ ID NO: 1610 - DNA, 20 bp, Artificial sequence
  Synthetic oligonucleotide
ctcctaacttacaatggaat

SEQ ID NO: 1611 - DNA, 20 bp, Artificial sequence
  Synthetic oligonucleotide
gacagagaccacccataaca

SEQ ID NO: 1612 - DNA, 20 bp, Artificial sequence
  Synthetic oligonucleotide
gcaggtacatatatgaatat

SEQ ID NO: 1613 - DNA, 20 bp, Artificial sequence
  Synthetic oligonucleotide
tgtcaaaaccactaaagtaa

SEQ ID NO: 1614 - DNA, 20 bp, Artificial sequence
  Synthetic oligonucleotide
atgcatttataattttggtt

SEQ ID NO: 1615 - DNA, 20 bp, Artificial sequence
  Synthetic oligonucleotide
taaagtttaaaaatttcccc

SEQ ID NO: 1616 - DNA, 20 bp, Artificial sequence
  Synthetic oligonucleotide
agagaattctaattgattta

SEQ ID NO: 1617 - DNA, 20 bp, Artificial sequence
  Synthetic oligonucleotide
acgcttggactcctgactca

SEQ ID NO: 1618 - DNA, 20 bp, Artificial sequence
  Synthetic oligonucleotide
gaataatgtctaacaagccg

SEQ ID NO: 1619 - DNA, 20 bp, Artificial sequence
  Synthetic oligonucleotide
cccataacccatttttcctt

SEQ ID NO: 1620 - DNA, 20 bp, Artificial sequence
  Synthetic oligonucleotide
agagacatcaacactccaga

SEQ ID NO: 1621 - DNA, 20 bp, Artificial sequence
  Synthetic oligonucleotide
aatctgtattttaaaagcaa

SEQ ID NO: 1622 - DNA, 20 bp, Artificial sequence
  Synthetic oligonucleotide
gcaaggctatgcaataccac

SEQ ID NO: 1623 - DNA, 20 bp, Artificial sequence
  Synthetic oligonucleotide
gcgccagcataccaatggac

SEQ ID NO: 1624 - DNA, 20 bp, Artificial sequence
  Synthetic oligonucleotide
caggatactttcatatttta

SEQ ID NO: 1625 - DNA, 20 bp, Artificial sequence
  Synthetic oligonucleotide
ctaggtattttcatatttgt

SEQ ID NO: 1626 - DNA, 20 bp, Artificial sequence
  Synthetic oligonucleotide
tggctttcacacaatataca

SEQ ID NO: 1627 - DNA, 20 bp, Artificial sequence
  Synthetic oligonucleotide
ctttagcccctattcacctt

SEQ ID NO: 1628 - DNA, 20 bp, Artificial sequence
  Synthetic oligonucleotide
aaaagcctacaggacagcct

SEQ ID NO: 1629 - DNA, 20 bp, Artificial sequence
  Synthetic oligonucleotide
cttcaaccttttcttccacc

SEQ ID NO: 1630 - DNA, 20 bp, Artificial sequence
  Synthetic oligonucleotide
gctgtgtgaaagactagcca

SEQ ID NO: 1631 - DNA, 20 bp, Artificial sequence
  Synthetic oligonucleotide
ctttgagacaataaacagct

SEQ ID NO: 1632 - DNA, 20 bp, Artificial sequence
  Synthetic oligonucleotide
gtcttgagttttcaacatga

SEQ ID NO: 1633 - DNA, 20 bp, Artificial sequence
  Synthetic oligonucleotide
tcaggaaactcacaaacaat

SEQ ID NO: 1634 - DNA, 20 bp, Artificial sequence
  Synthetic oligonucleotide
gtcaaaaccactaaagtaat

SEQ ID NO: 1635 - DNA, 20 bp, Artificial sequence
  Synthetic oligonucleotide
tatgtatacacaatgtgtgt

SEQ ID NO: 1636 - DNA, 20 bp, Artificial sequence
  Synthetic oligonucleotide
acaatgataaacctatttta

SEQ ID NO: 1637 - DNA, 20 bp, Artificial sequence
  Synthetic oligonucleotide
ggctatgcaataccacagca

SEQ ID NO: 1638 - DNA, 20 bp, Artificial sequence
  Synthetic oligonucleotide
gagacatcaacactccagaa

SEQ ID NO: 1639 - DNA, 20 bp, Artificial sequence
  Synthetic oligonucleotide
ctgctttaccaagtctgtta

SEQ ID NO: 1640 - DNA, 20 bp, Artificial sequence
  Synthetic oligonucleotide
ggaatggaacttactggagc

SEQ ID NO: 1641 - DNA, 20 bp, Artificial sequence
  Synthetic oligonucleotide
aatcccctcctcttgagcat

SEQ ID NO: 1642 - DNA, 20 bp, Artificial sequence
  Synthetic oligonucleotide
tttagcccctattcaccttt

SEQ ID NO: 1643 - DNA, 20 bp, Artificial sequence
  Synthetic oligonucleotide
ctgtggtctttatacaatgt

SEQ ID NO: 1644 - DNA, 20 bp, Artificial sequence
  Synthetic oligonucleotide
cttcttgcatacactatctt

SEQ ID NO: 1645 - DNA, 20 bp, Artificial sequence
  Synthetic oligonucleotide
tcatgattttacacatggaa

SEQ ID NO: 1646 - DNA, 20 bp, Artificial sequence
  Synthetic oligonucleotide
ttgagaacttttacctatgt

SEQ ID NO: 1647 - DNA, 20 bp, Artificial sequence
  Synthetic oligonucleotide
tagcggtaatgaactccctt

SEQ ID NO: 1648 - DNA, 20 bp, Artificial sequence
  Synthetic oligonucleotide
ctcacagaccacctggactc

SEQ ID NO: 1649 - DNA, 20 bp, Artificial sequence
  Synthetic oligonucleotide
gtctgtacaagaaatttcaa

SEQ ID NO: 1650 - DNA, 20 bp, Artificial sequence
  Synthetic oligonucleotide
gtatttctccctcattcctg

SEQ ID NO: 1651 - DNA, 20 bp, Artificial sequence
  Synthetic oligonucleotide
gttcagtctaacattggcct

SEQ ID NO: 1652 - DNA, 20 bp, Artificial sequence
  Synthetic oligonucleotide
ggactggcctatacagcctc

SEQ ID NO: 1653 - DNA, 20 bp, Artificial sequence
  Synthetic oligonucleotide
acagagaccacccataacaa

SEQ ID NO: 1654 - DNA, 20 bp, Artificial sequence
  Synthetic oligonucleotide
ttcaaccttttcttccacca

SEQ ID NO: 1655 - DNA, 20 bp, Artificial sequence
  Synthetic oligonucleotide
caactgccttttcatgtcta

SEQ ID NO: 1656 - DNA, 20 bp, Artificial sequence
  Synthetic oligonucleotide
ctcaaattcacaaaacccac

SEQ ID NO: 1657 - DNA, 20 bp, Artificial sequence
  Synthetic oligonucleotide
gtactagtaatattctgaca

SEQ ID NO: 1658 - DNA, 20 bp, Artificial sequence
  Synthetic oligonucleotide
ctttgctctctctactcctc

SEQ ID NO: 1659 - DNA, 20 bp, Artificial sequence
  Synthetic oligonucleotide
tgtccttctacaattcagta

SEQ ID NO: 1660 - DNA, 20 bp, Artificial sequence
  Synthetic oligonucleotide
cctggacttcatccatgttt

SEQ ID NO: 1661 - DNA, 20 bp, Artificial sequence
  Synthetic oligonucleotide
gcactgagtccacagcaacc

SEQ ID NO: 1662 - DNA, 20 bp, Artificial sequence
  Synthetic oligonucleotide
ttgtgttaaacataaatctc

SEQ ID NO: 1663 - DNA, 20 bp, Artificial sequence
  Synthetic oligonucleotide
gaggttgaccctaatcttgt

SEQ ID NO: 1664 - DNA, 20 bp, Artificial sequence
  Synthetic oligonucleotide
tcttgtcctaattattttac

SEQ ID NO: 1665 - DNA, 20 bp, Artificial sequence
  Synthetic oligonucleotide
tcagtatcaaactttatctc

SEQ ID NO: 1666 - DNA, 20 bp, Artificial sequence
  Synthetic oligonucleotide
tggttgctttcaacctttca

SEQ ID NO: 1667 - DNA, 20 bp, Artificial sequence
  Synthetic oligonucleotide
agtatggaatttaatccatt

SEQ ID NO: 1668 - DNA, 20 bp, Artificial sequence
  Synthetic oligonucleotide
ttttaaattcatttatggtt

SEQ ID NO: 1669 - DNA, 20 bp, Artificial sequence
  Synthetic oligonucleotide
caatgccaaaaccttcattc

SEQ ID NO: 1670 - DNA, 20 bp, Artificial sequence
  Synthetic oligonucleotide
agtcctaaaccacacaacac

SEQ ID NO: 1671 - DNA, 20 bp, Artificial sequence
  Synthetic oligonucleotide
ttttaggatcctcctattct

SEQ ID NO: 1672 - DNA, 20 bp, Artificial sequence
  Synthetic oligonucleotide
tggcatttcctcccattctc

SEQ ID NO: 1673 - DNA, 20 bp, Artificial sequence
  Synthetic oligonucleotide
ttttctctcacatcgattaa

SEQ ID NO: 1674 - DNA, 20 bp, Artificial sequence
  Synthetic oligonucleotide
cctaacttacaatggaatta

SEQ ID NO: 1675 - DNA, 20 bp, Artificial sequence
  Synthetic oligonucleotide
ggttcaaaattaacactaaa

SEQ ID NO: 1676 - DNA, 20 bp, Artificial sequence
  Synthetic oligonucleotide
ttttagattttttccaccta

SEQ ID NO: 1677 - DNA, 20 bp, Artificial sequence
  Synthetic oligonucleotide
taggtattttcatatttgtt

SEQ ID NO: 1678 - DNA, 20 bp, Artificial sequence
  Synthetic oligonucleotide
atctgtattttaaaagcaaa

SEQ ID NO: 1679 - DNA, 20 bp, Artificial sequence
  Synthetic oligonucleotide
agaacatactaattgcctta

SEQ ID NO: 1680 - DNA, 20 bp, Artificial sequence
  Synthetic oligonucleotide
ggaggaaaacaaacaactgt

SEQ ID NO: 1681 - DNA, 20 bp, Artificial sequence
  Synthetic oligonucleotide
agtgactttctaattttccc

SEQ ID NO: 1682 - DNA, 20 bp, Artificial sequence
  Synthetic oligonucleotide
tacctctcattatctatttg

SEQ ID NO: 1683 - DNA, 20 bp, Artificial sequence
  Synthetic oligonucleotide
gcatagtaccttacatataa

SEQ ID NO: 1684 - DNA, 20 bp, Artificial sequence
  Synthetic oligonucleotide
ttacaaaattatactataca

SEQ ID NO: 1685 - DNA, 20 bp, Artificial sequence
  Synthetic oligonucleotide
ggctttcacacaatatacag

SEQ ID NO: 1686 - DNA, 20 bp, Artificial sequence
  Synthetic oligonucleotide
ttttttcattacctccccaa

SEQ ID NO: 1687 - DNA, 20 bp, Artificial sequence
  Synthetic oligonucleotide
gctttgtctttacagccccc

SEQ ID NO: 1688 - DNA, 20 bp, Artificial sequence
  Synthetic oligonucleotide
ctaatgtaatatttacttca

SEQ ID NO: 1689 - DNA, 20 bp, Artificial sequence
  Synthetic oligonucleotide
acagacatctgaaaaccgac

SEQ ID NO: 1690 - DNA, 20 bp, Artificial sequence
  Synthetic oligonucleotide
tctaattgatttacaagtac

SEQ ID NO: 1691 - DNA, 20 bp, Artificial sequence
  Synthetic oligonucleotide
agccaagttattacttatga

SEQ ID NO: 1692 - DNA, 20 bp, Artificial sequence
  Synthetic oligonucleotide
gtggaatacattttattcct

SEQ ID NO: 1693 - DNA, 20 bp, Artificial sequence
  Synthetic oligonucleotide
ctttcgctttcatcttcatt

SEQ ID NO: 1694 - DNA, 20 bp, Artificial sequence
  Synthetic oligonucleotide
ggcattaaaaataccttaaa

SEQ ID NO: 1695 - DNA, 20 bp, Artificial sequence
  Synthetic oligonucleotide
acacaggtacatattatata

SEQ ID NO: 1696 - DNA, 20 bp, Artificial sequence
  Synthetic oligonucleotide
gctttaatcctaaaccatgt

SEQ ID NO: 1697 - DNA, 20 bp, Artificial sequence
  Synthetic oligonucleotide
actttcatattttaacattc

SEQ ID NO: 1698 - DNA, 20 bp, Artificial sequence
  Synthetic oligonucleotide
tcatctcctacaattttcca

SEQ ID NO: 1699 - DNA, 20 bp, Artificial sequence
  Synthetic oligonucleotide
cgccagcataccaatggaca

SEQ ID NO: 1700 - DNA, 20 bp, Artificial sequence
  Synthetic oligonucleotide
aaagtttaaaaatttccccc

SEQ ID NO: 1701 - DNA, 20 bp, Artificial sequence
  Synthetic oligonucleotide
ccataacccatttttccttc

SEQ ID NO: 1702 - DNA, 20 bp, Artificial sequence
  Synthetic oligonucleotide
tccactctcccacataccat

SEQ ID NO: 1703 - DNA, 20 bp, Artificial sequence
  Synthetic oligonucleotide
cctggatcaccacctgggtc

SEQ ID NO: 1704 - DNA, 20 bp, Artificial sequence
  Synthetic oligonucleotide
tcaggccttccacactgacc

SEQ ID NO: 1705 - DNA, 20 bp, Artificial sequence
  Synthetic oligonucleotide
atacatcacatccccttatc

SEQ ID NO: 1706 - DNA, 20 bp, Artificial sequence
  Synthetic oligonucleotide
tgacagatcattcataagtc

SEQ ID NO: 1707 - DNA, 20 bp, Artificial sequence
  Synthetic oligonucleotide
ctggaaaaccagtcacagac

SEQ ID NO: 1708 - DNA, 20 bp, Artificial sequence
  Synthetic oligonucleotide
catgattttacacatggaaa

SEQ ID NO: 1709 - DNA, 20 bp, Artificial sequence
  Synthetic oligonucleotide
ccttctacaattcagtaaaa

SEQ ID NO: 1710 - DNA, 20 bp, Artificial sequence
  Synthetic oligonucleotide
cttgtcctaattattttact

SEQ ID NO: 1711 - DNA, 20 bp, Artificial sequence
  Synthetic oligonucleotide
ccactctcccacataccatg

SEQ ID NO: 1712 - DNA, 20 bp, Artificial sequence
  Synthetic oligonucleotide
ccttttcttccaccaggatc

SEQ ID NO: 1713 - DNA, 20 bp, Artificial sequence
  Synthetic oligonucleotide
ctggacttcatccatgttta

SEQ ID NO: 1714 - DNA, 20 bp, Artificial sequence
  Synthetic oligonucleotide
gcttttgtctatctaagaac

SEQ ID NO: 1715 - DNA, 20 bp, Artificial sequence
  Synthetic oligonucleotide
tgtggtctttatacaatgta

SEQ ID NO: 1716 - DNA, 20 bp, Artificial sequence
  Synthetic oligonucleotide
tgactttctaattttcccca

SEQ ID NO: 1717 - DNA, 20 bp, Artificial sequence
  Synthetic oligonucleotide
aaattcacaaaacccaccct

SEQ ID NO: 1718 - DNA, 20 bp, Artificial sequence
  Synthetic oligonucleotide
gccaagttattacttatgaa

SEQ ID NO: 1719 - DNA, 20 bp, Artificial sequence
  Synthetic oligonucleotide
ctttcatattttaacattcc

SEQ ID NO: 1720 - DNA, 20 bp, Artificial sequence
  Synthetic oligonucleotide
aatggaacttactggagcca

SEQ ID NO: 1721 - DNA, 20 bp, Artificial sequence
  Synthetic oligonucleotide
atgctgataattacatttct

SEQ ID NO: 1722 - DNA, 20 bp, Artificial sequence
  Synthetic oligonucleotide
gctatgcaataccacagcaa

SEQ ID NO: 1723 - DNA, 20 bp, Artificial sequence
  Synthetic oligonucleotide
ctggatcaccacctgggtca

SEQ ID NO: 1724 - DNA, 20 bp, Artificial sequence
  Synthetic oligonucleotide
tgtgttaaacataaatctcc

SEQ ID NO: 1725 - DNA, 20 bp, Artificial sequence
  Synthetic oligonucleotide
aggttccacatcagaatcta

SEQ ID NO: 1726 - DNA, 20 bp, Artificial sequence
  Synthetic oligonucleotide
atacattttattcctggcaa

SEQ ID NO: 1727 - DNA, 20 bp, Artificial sequence
  Synthetic oligonucleotide
gatgctagccctgattctct

SEQ ID NO: 1728 - DNA, 20 bp, Artificial sequence
  Synthetic oligonucleotide
gagatatgcatctaacataa

SEQ ID NO: 1729 - DNA, 20 bp, Artificial sequence
  Synthetic oligonucleotide
atgtaattcattgaattctt

SEQ ID NO: 1730 - DNA, 20 bp, Artificial sequence
  Synthetic oligonucleotide
catctcctacaattttccaa

SEQ ID NO: 1731 - DNA, 20 bp, Artificial sequence
  Synthetic oligonucleotide
gcaggacctgtaaatacgat

SEQ ID NO: 1732 - DNA, 20 bp, Artificial sequence
  Synthetic oligonucleotide
ggttgaccctaatcttgtcc

SEQ ID NO: 1733 - DNA, 20 bp, Artificial sequence
  Synthetic oligonucleotide
aggtattttcatatttgtta

SEQ ID NO: 1734 - DNA, 20 bp, Artificial sequence
  Synthetic oligonucleotide
gaaaaccgaccataattctc

SEQ ID NO: 1735 - DNA, 20 bp, Artificial sequence
  Synthetic oligonucleotide
tttcgctttcatcttcatta

SEQ ID NO: 1736 - DNA, 20 bp, Artificial sequence
  Synthetic oligonucleotide
ctgagaagaatcacattaca

SEQ ID NO: 1737 - DNA, 20 bp, Artificial sequence
  Synthetic oligonucleotide
tttgagacaataaacagctg

SEQ ID NO: 1738 - DNA, 20 bp, Artificial sequence
  Synthetic oligonucleotide
tttttcattacctccccaac

SEQ ID NO: 1739 - DNA, 20 bp, Artificial sequence
  Synthetic oligonucleotide
atagtaccttacatataagt

SEQ ID NO: 1740 - DNA, 20 bp, Artificial sequence
  Synthetic oligonucleotide
gtatggaatttaatccattt

SEQ ID NO: 1741 - DNA, 20 bp, Artificial sequence
  Synthetic oligonucleotide
cacaggtacatattatatat

SEQ ID NO: 1742 - DNA, 20 bp, Artificial sequence
  Synthetic oligonucleotide
aggaaaacaaacaactgtac

SEQ ID NO: 1743 - DNA, 20 bp, Artificial sequence
  Synthetic oligonucleotide
acatcgattaaacagaggta

SEQ ID NO: 1744 - DNA, 20 bp, Artificial sequence
  Synthetic oligonucleotide
tctgtattttaaaagcaaac

SEQ ID NO: 1745 - DNA, 20 bp, Artificial sequence
  Synthetic oligonucleotide
cctctcattatctatttggt

SEQ ID NO: 1746 - DNA, 20 bp, Artificial sequence
  Synthetic oligonucleotide
acaaaattatactatacagt

SEQ ID NO: 1747 - DNA, 20 bp, Artificial sequence
  Synthetic oligonucleotide
tgagaacttttacctatgtt

SEQ ID NO: 1748 - DNA, 20 bp, Artificial sequence
  Synthetic oligonucleotide
gacagatcattcataagtca

SEQ ID NO: 1749 - DNA, 20 bp, Artificial sequence
  Synthetic oligonucleotide
taacccatttttccttctac

SEQ ID NO: 1750 - DNA, 20 bp, Artificial sequence
  Synthetic oligonucleotide
agagaccacccataacaaga

SEQ ID NO: 1751 - DNA, 20 bp, Artificial sequence
  Synthetic oligonucleotide
ggcatttcctcccattctcc

SEQ ID NO: 1752 - DNA, 20 bp, Artificial sequence
  Synthetic oligonucleotide
tggttcctacaatatttctt

SEQ ID NO: 1753 - DNA, 20 bp, Artificial sequence
  Synthetic oligonucleotide
acatcacatccccttatccc

SEQ ID NO: 1754 - DNA, 20 bp, Artificial sequence
  Synthetic oligonucleotide
cattgtattacctctgatta

SEQ ID NO: 1755 - DNA, 20 bp, Artificial sequence
  Synthetic oligonucleotide
gtccacagcaaccataggca

SEQ ID NO: 1756 - DNA, 20 bp, Artificial sequence
  Synthetic oligonucleotide
tgccaaaaccttcattcaac

SEQ ID NO: 1757 - DNA, 20 bp, Artificial sequence
  Synthetic oligonucleotide
caggccttccacactgacca

SEQ ID NO: 1758 - DNA, 20 bp, Artificial sequence
  Synthetic oligonucleotide
gactggcctatacagcctca

SEQ ID NO: 1759 - DNA, 20 bp, Artificial sequence
  Synthetic oligonucleotide
gttgctttcaacctttcaca

SEQ ID NO: 1760 - DNA, 20 bp, Artificial sequence
  Synthetic oligonucleotide
tttgctctctctactcctct

SEQ ID NO: 1761 - DNA, 20 bp, Artificial sequence
  Synthetic oligonucleotide
atttacttcatgaaatccgt

SEQ ID NO: 1762 - DNA, 20 bp, Artificial sequence
  Synthetic oligonucleotide
gctgaggaaatccctatttc

SEQ ID NO: 1763 - DNA, 20 bp, Artificial sequence
  Synthetic oligonucleotide
ggcttagtaaacctcgagaa

SEQ ID NO: 1764 - DNA, 20 bp, Artificial sequence
  Synthetic oligonucleotide
tgtaatgtatatatacagta

SEQ ID NO: 1765 - DNA, 20 bp, Artificial sequence
  Synthetic oligonucleotide
gataaacctattttatggta

SEQ ID NO: 1766 - DNA, 20 bp, Artificial sequence
  Synthetic oligonucleotide
tggacactgattaagtgcta

SEQ ID NO: 1767 - DNA, 20 bp, Artificial sequence
  Synthetic oligonucleotide
tgcatacactatcttctggc

SEQ ID NO: 1768 - DNA, 20 bp, Artificial sequence
  Synthetic oligonucleotide
tatcaaactttatctcttca

SEQ ID NO: 1769 - DNA, 20 bp, Artificial sequence
  Synthetic oligonucleotide
gtttgagtatatcatcccat

SEQ ID NO: 1770 - DNA, 20 bp, Artificial sequence
  Synthetic oligonucleotide
cttgagttttcaacatgatt

SEQ ID NO: 1771 - DNA, 20 bp, Artificial sequence
  Synthetic oligonucleotide
ctttaatcctaaaccatgta

SEQ ID NO: 1772 - DNA, 20 bp, Artificial sequence
  Synthetic oligonucleotide
tcaaaattaacactaaaaga

SEQ ID NO: 1773 - DNA, 20 bp, Artificial sequence
  Synthetic oligonucleotide
gtcctaaaccacacaacact

SEQ ID NO: 1774 - DNA, 20 bp, Artificial sequence
  Synthetic oligonucleotide
ttcagtctaacattggcctc

SEQ ID NO: 1775 - DNA, 20 bp, Artificial sequence
  Synthetic oligonucleotide
gctttcacacaatatacagt

SEQ ID NO: 1776 - DNA, 20 bp, Artificial sequence
  Synthetic oligonucleotide
cgcttgttcactgaaaacca

SEQ ID NO: 1777 - DNA, 20 bp, Artificial sequence
  Synthetic oligonucleotide
gagaaccactactacaggga

SEQ ID NO: 1778 - DNA, 20 bp, Artificial sequence
  Synthetic oligonucleotide
ttagcccctattcaccttta

SEQ ID NO: 1779 - DNA, 20 bp, Artificial sequence
  Synthetic oligonucleotide
tactagtaatattctgacac

SEQ ID NO: 1780 - DNA, 20 bp, Artificial sequence
  Synthetic oligonucleotide
aagtttaaaaatttccccca

SEQ ID NO: 1781 - DNA, 20 bp, Artificial sequence
  Synthetic oligonucleotide
agtgaggtcactcatatctt

SEQ ID NO: 1782 - DNA, 20 bp, Artificial sequence
  Synthetic oligonucleotide
ctgagtctttagaaatgcaa

SEQ ID NO: 1783 - DNA, 20 bp, Artificial sequence
  Synthetic oligonucleotide
tcaaaaccactaaagtaata

SEQ ID NO: 1784 - DNA, 20 bp, Artificial sequence
  Synthetic oligonucleotide
tttaggatcctcctattctt

SEQ ID NO: 1785 - DNA, 20 bp, Artificial sequence
  Synthetic oligonucleotide
atggaatttaatccatttac

SEQ ID NO: 1786 - DNA, 20 bp, Artificial sequence
  Synthetic oligonucleotide
aaattatactatacagtctt

SEQ ID NO: 1787 - DNA, 20 bp, Artificial sequence
  Synthetic oligonucleotide
ttgctttcaacctttcacat

SEQ ID NO: 1788 - DNA, 20 bp, Artificial sequence
  Synthetic oligonucleotide
agaccacccataacaagagt

SEQ ID NO: 1789 - DNA, 20 bp, Artificial sequence
  Synthetic oligonucleotide
attcagtaaaacaaacactg

SEQ ID NO: 1790 - DNA, 20 bp, Artificial sequence
  Synthetic oligonucleotide
ggtattttcatatttgttac

SEQ ID NO: 1791 - DNA, 20 bp, Artificial sequence
  Synthetic oligonucleotide
gcttagtaaacctcgagaac

SEQ ID NO: 1792 - DNA, 20 bp, Artificial sequence
  Synthetic oligonucleotide
accatgtcaattacaagctt

SEQ ID NO: 1793 - DNA, 20 bp, Artificial sequence
  Synthetic oligonucleotide
atgcagctcacccataactc

SEQ ID NO: 1794 - DNA, 20 bp, Artificial sequence
  Synthetic oligonucleotide
gttgaccctaatcttgtccc

SEQ ID NO: 1795 - DNA, 20 bp, Artificial sequence
  Synthetic oligonucleotide
tactggactatagacaccaa

SEQ ID NO: 1796 - DNA, 20 bp, Artificial sequence
  Synthetic oligonucleotide
catcgattaaacagaggtaa

SEQ ID NO: 1797 - DNA, 20 bp, Artificial sequence
  Synthetic oligonucleotide
ctttctaattttccccataa

SEQ ID NO: 1798 - DNA, 20 bp, Artificial sequence
  Synthetic oligonucleotide
tcctaaaccacacaacactt

SEQ ID NO: 1799 - DNA, 20 bp, Artificial sequence
  Synthetic oligonucleotide
gctctctctactcctctgcc

SEQ ID NO: 1800 - DNA, 20 bp, Artificial sequence
  Synthetic oligonucleotide
catccatgtttagctagcct

SEQ ID NO: 1801 - DNA, 20 bp, Artificial sequence
  Synthetic oligonucleotide
accactaaagtaataaagaa

SEQ ID NO: 1802 - DNA, 20 bp, Artificial sequence
  Synthetic oligonucleotide
ctgaggaaatccctatttcc

SEQ ID NO: 1803 - DNA, 20 bp, Artificial sequence
  Synthetic oligonucleotide
acagatcattcataagtcaa

SEQ ID NO: 1804 - DNA, 20 bp, Artificial sequence
  Synthetic oligonucleotide
aggtcactcatatcttagta

SEQ ID NO: 1805 - DNA, 20 bp, Artificial sequence
  Synthetic oligonucleotide
atagcggtacttacacttcc

SEQ ID NO: 1806 - DNA, 20 bp, Artificial sequence
  Synthetic oligonucleotide
ggttttggcctcaaactgcc

SEQ ID NO: 1807 - DNA, 20 bp, Artificial sequence
  Synthetic oligonucleotide
atggtaacaaacatttgcca

SEQ ID NO: 1808 - DNA, 20 bp, Artificial sequence
  Synthetic oligonucleotide
atgcagatgccaccacgcct

SEQ ID NO: 1809 - DNA, 20 bp, Artificial sequence
  Synthetic oligonucleotide
atattctgacacccagacaa

SEQ ID NO: 1810 - DNA, 20 bp, Artificial sequence
  Synthetic oligonucleotide
ggaaaacaaacaactgtact

SEQ ID NO: 1811 - DNA, 20 bp, Artificial sequence
  Synthetic oligonucleotide
agtttaaaaatttcccccaa

SEQ ID NO: 1812 - DNA, 20 bp, Artificial sequence
  Synthetic oligonucleotide
aagtcccccaaccatcagaa

SEQ ID NO: 1813 - DNA, 20 bp, Artificial sequence
  Synthetic oligonucleotide
gtgttaaacataaatctcca

SEQ ID NO: 1814 - DNA, 20 bp, Artificial sequence
  Synthetic oligonucleotide
gtttgtctcaactcttttaa

SEQ ID NO: 1815 - DNA, 20 bp, Artificial sequence
  Synthetic oligonucleotide
catcacatccccttatccca

SEQ ID NO: 1816 - DNA, 20 bp, Artificial sequence
  Synthetic oligonucleotide
acaggtacatattatatata

SEQ ID NO: 1817 - DNA, 20 bp, Artificial sequence
  Synthetic oligonucleotide
actgatggcaccagtgccct

SEQ ID NO: 1818 - DNA, 20 bp, Artificial sequence
  Synthetic oligonucleotide
taagtgctaaaatagagaca

SEQ ID NO: 1819 - DNA, 20 bp, Artificial sequence
  Synthetic oligonucleotide
aaaaccgaccataattctca

SEQ ID NO: 1820 - DNA, 20 bp, Artificial sequence
  Synthetic oligonucleotide
aacagaagtccctcaacatt

SEQ ID NO: 1821 - DNA, 20 bp, Artificial sequence
  Synthetic oligonucleotide
atgcatctaacataaaagaa

SEQ ID NO: 1822 - DNA, 20 bp, Artificial sequence
  Synthetic oligonucleotide
aaactttatctcttcagacc

SEQ ID NO: 1823 - DNA, 20 bp, Artificial sequence
  Synthetic oligonucleotide
tccacatcagaatctatttc

SEQ ID NO: 1824 - DNA, 20 bp, Artificial sequence
  Synthetic oligonucleotide
ttaggatcctcctattcttg

SEQ ID NO: 1825 - DNA, 20 bp, Artificial sequence
  Synthetic oligonucleotide
gctgataattacatttctgc

SEQ ID NO: 1826 - DNA, 20 bp, Artificial sequence
  Synthetic oligonucleotide
cgctttcatcttcattagaa

SEQ ID NO: 1827 - DNA, 20 bp, Artificial sequence
  Synthetic oligonucleotide
gcaggaagaagatataggtt

SEQ ID NO: 1828 - DNA, 20 bp, Artificial sequence
  Synthetic oligonucleotide
gagtatatcatcccatcctc

SEQ ID NO: 1829 - DNA, 20 bp, Artificial sequence
  Synthetic oligonucleotide
acccatttttccttctactt

SEQ ID NO: 1830 - DNA, 20 bp, Artificial sequence
  Synthetic oligonucleotide
cttttgtctatctaagaaca

SEQ ID NO: 1831 - DNA, 20 bp, Artificial sequence
  Synthetic oligonucleotide
gccaaaaccttcattcaaca

SEQ ID NO: 1832 - DNA, 20 bp, Artificial sequence
  Synthetic oligonucleotide
ctgaattttaaaatacagtt

SEQ ID NO: 1833 - DNA, 20 bp, Artificial sequence
  Synthetic oligonucleotide
accacagcaaacttcattca

SEQ ID NO: 1834 - DNA, 20 bp, Artificial sequence
  Synthetic oligonucleotide
tctcctacaattttccaatc

SEQ ID NO: 1835 - DNA, 20 bp, Artificial sequence
  Synthetic oligonucleotide
tttcatattttaacattcca

SEQ ID NO: 1836 - DNA, 20 bp, Artificial sequence
  Synthetic oligonucleotide
tctcattatctatttggtga

SEQ ID NO: 1837 - DNA, 20 bp, Artificial sequence
  Synthetic oligonucleotide
gagaagaatcacattacaga

SEQ ID NO: 1838 - DNA, 20 bp, Artificial sequence
  Synthetic oligonucleotide
ctttcacacaatatacagtc

SEQ ID NO: 1839 - DNA, 20 bp, Artificial sequence
  Synthetic oligonucleotide
cattgaattcttcaactgta

SEQ ID NO: 1840 - DNA, 20 bp, Artificial sequence
  Synthetic oligonucleotide
cttttcttccaccaggatca

SEQ ID NO: 1841 - DNA, 20 bp, Artificial sequence
  Synthetic oligonucleotide
tagcccctattcacctttac

SEQ ID NO: 1842 - DNA, 20 bp, Artificial sequence
  Synthetic oligonucleotide
gcatttcctcccattctcca

SEQ ID NO: 1843 - DNA, 20 bp, Artificial sequence
  Synthetic oligonucleotide
ctgaaaaccacagatggtct

SEQ ID NO: 1844 - DNA, 20 bp, Artificial sequence
  Synthetic oligonucleotide
tccgtttcataatataactt

SEQ ID NO: 1845 - DNA, 20 bp, Artificial sequence
  Synthetic oligonucleotide
ttgagacaataaacagctgt

SEQ ID NO: 1846 - DNA, 20 bp, Artificial sequence
  Synthetic oligonucleotide
ttgggtacccctcctcacta

SEQ ID NO: 1847 - DNA, 20 bp, Artificial sequence
  Synthetic oligonucleotide
tggagccactgaacttgaaa

SEQ ID NO: 1848 - DNA, 20 bp, Artificial sequence
  Synthetic oligonucleotide
tagtaccttacatataagta

SEQ ID NO: 1849 - DNA, 20 bp, Artificial sequence
  Synthetic oligonucleotide
ggttcctacaatatttcttt

SEQ ID NO: 1850 - DNA, 20 bp, Artificial sequence
  Synthetic oligonucleotide
gcatacactatcttctggca

SEQ ID NO: 1851 - DNA, 20 bp, Artificial sequence
  Synthetic oligonucleotide
ggacctgtaaatacgatgga

SEQ ID NO: 1852 - DNA, 20 bp, Artificial sequence
  Synthetic oligonucleotide
ttgtcctaattattttacta

SEQ ID NO: 1853 - DNA, 20 bp, Artificial sequence
  Synthetic oligonucleotide
aattcacaaaacccacccta

SEQ ID NO: 1854 - DNA, 20 bp, Artificial sequence
  Synthetic oligonucleotide
ttttcattacctccccaact

SEQ ID NO: 1855 - DNA, 20 bp, Artificial sequence
  Synthetic oligonucleotide
gagaacttttacctatgtta

SEQ ID NO: 1856 - DNA, 20 bp, Artificial sequence
  Synthetic oligonucleotide
cactctcccacataccatgt

SEQ ID NO: 1857 - DNA, 20 bp, Artificial sequence
  Synthetic oligonucleotide
agccaagccaaaccctgcaa

SEQ ID NO: 1858 - DNA, 20 bp, Artificial sequence
  Synthetic oligonucleotide
tgtctgttaactaagcataa

SEQ ID NO: 1859 - DNA, 20 bp, Artificial sequence
  Synthetic oligonucleotide
ggcaatgacatttacattta

SEQ ID NO: 1860 - DNA, 20 bp, Artificial sequence
  Synthetic oligonucleotide
tgcaaggtccaatatatcga

SEQ ID NO: 1861 - DNA, 20 bp, Artificial sequence
  Synthetic oligonucleotide
atttgtttatatatgcatac

SEQ ID NO: 1862 - DNA, 20 bp, Artificial sequence
  Synthetic oligonucleotide
ctcctacaattttccaatca

SEQ ID NO: 1863 - DNA, 20 bp, Artificial sequence
  Synthetic oligonucleotide
gttacagacacagaaaacta

SEQ ID NO: 1864 - DNA, 20 bp, Artificial sequence
  Synthetic oligonucleotide
gttttggcctcaaactgcct

SEQ ID NO: 1865 - DNA, 20 bp, Artificial sequence
  Synthetic oligonucleotide
aagttttctaataatatcct

SEQ ID NO: 1866 - DNA, 20 bp, Artificial sequence
  Synthetic oligonucleotide
tttcacacaatatacagtca

SEQ ID NO: 1867 - DNA, 20 bp, Artificial sequence
  Synthetic oligonucleotide
cagaatggaccccttctcct

SEQ ID NO: 1868 - DNA, 20 bp, Artificial sequence
  Synthetic oligonucleotide
cacccagacaattttatcca

SEQ ID NO: 1869 - DNA, 20 bp, Artificial sequence
  Synthetic oligonucleotide
tcagtaaaacaaacactgcc

SEQ ID NO: 1870 - DNA, 20 bp, Artificial sequence
  Synthetic oligonucleotide
acagaggtaaaaataatgct

SEQ ID NO: 1871 - DNA, 20 bp, Artificial sequence
  Synthetic oligonucleotide
catctgttttttcagcagaa

SEQ ID NO: 1872 - DNA, 20 bp, Artificial sequence
  Synthetic oligonucleotide
ccaactgtaacttcaggtct

SEQ ID NO: 1873 - DNA, 20 bp, Artificial sequence
  Synthetic oligonucleotide
gttaactaagcataacagta

SEQ ID NO: 1874 - DNA, 20 bp, Artificial sequence
  Synthetic oligonucleotide
gtaacttgcccagaaaccaa

SEQ ID NO: 1875 - DNA, 20 bp, Artificial sequence
  Synthetic oligonucleotide
cactcatatcttagtacctt

SEQ ID NO: 1876 - DNA, 20 bp, Artificial sequence
  Synthetic oligonucleotide
gtttaaaaatttcccccaaa

SEQ ID NO: 1877 - DNA, 20 bp, Artificial sequence
  Synthetic oligonucleotide
ttcatattttaacattccac

SEQ ID NO: 1878 - DNA, 20 bp, Artificial sequence
  Synthetic oligonucleotide
catttcctcccattctccat

SEQ ID NO: 1879 - DNA, 20 bp, Artificial sequence
  Synthetic oligonucleotide
ctctctctactcctctgcca

SEQ ID NO: 1880 - DNA, 20 bp, Artificial sequence
  Synthetic oligonucleotide
agaagaatcacattacagac

SEQ ID NO: 1881 - DNA, 20 bp, Artificial sequence
  Synthetic oligonucleotide
gctcaggcttccagtggaac

SEQ ID NO: 1882 - DNA, 20 bp, Artificial sequence
  Synthetic oligonucleotide
gcaatgacatttacatttaa

SEQ ID NO: 1883 - DNA, 20 bp, Artificial sequence
  Synthetic oligonucleotide
cacagcaaacttcattcaat

SEQ ID NO: 1884 - DNA, 20 bp, Artificial sequence
  Synthetic oligonucleotide
atggtttcccaggaacagat

SEQ ID NO: 1885 - DNA, 20 bp, Artificial sequence
  Synthetic oligonucleotide
ccatgtcaattacaagctta

SEQ ID NO: 1886 - DNA, 20 bp, Artificial sequence
  Synthetic oligonucleotide
atggaggccctcctctcata

SEQ ID NO: 1887 - DNA, 20 bp, Artificial sequence
  Synthetic oligonucleotide
tatttggtgaccctattatt

SEQ ID NO: 1888 - DNA, 20 bp, Artificial sequence
  Synthetic oligonucleotide
acagaagtccctcaacattt

SEQ ID NO: 1889 - DNA, 20 bp, Artificial sequence
  Synthetic oligonucleotide
ctacaatatttcttttactt

SEQ ID NO: 1890 - DNA, 20 bp, Artificial sequence
  Synthetic oligonucleotide
gactatagacaccaattttc

SEQ ID NO: 1891 - DNA, 20 bp, Artificial sequence
  Synthetic oligonucleotide
ccttgtgctccaacttccta

SEQ ID NO: 1892 - DNA, 20 bp, Artificial sequence
  Synthetic oligonucleotide
tgcatctaacataaaagaaa

SEQ ID NO: 1893 - DNA, 20 bp, Artificial sequence
  Synthetic oligonucleotide
caggtacatattatatataa

SEQ ID NO: 1894 - DNA, 20 bp, Artificial sequence
  Synthetic oligonucleotide
ttagattttgcatcatgcaa

SEQ ID NO: 1895 - DNA, 20 bp, Artificial sequence
  Synthetic oligonucleotide
aagtaataaagaaaatagga

SEQ ID NO: 1896 - DNA, 20 bp, Artificial sequence
  Synthetic oligonucleotide
tatttgttacttccttttaa

SEQ ID NO: 1897 - DNA, 20 bp, Artificial sequence
  Synthetic oligonucleotide
gctttcaacctttcacattc

SEQ ID NO: 1898 - DNA, 20 bp, Artificial sequence
  Synthetic oligonucleotide
tatgcatacacaattactga

SEQ ID NO: 1899 - DNA, 20 bp, Artificial sequence
  Synthetic oligonucleotide
gtttagctagcctctgctca

SEQ ID NO: 1900 - DNA, 20 bp, Artificial sequence
  Synthetic oligonucleotide
gctttcatcttcattagaat

SEQ ID NO: 1901 - DNA, 20 bp, Artificial sequence
  Synthetic oligonucleotide
tggttgtttttcatcatgtt

SEQ ID NO: 1902 - DNA, 20 bp, Artificial sequence
  Synthetic oligonucleotide
gtatatcatcccatcctctt

SEQ ID NO: 1903 - DNA, 20 bp, Artificial sequence
  Synthetic oligonucleotide
ggatcctcctattcttgtct

SEQ ID NO: 1904 - DNA, 20 bp, Artificial sequence
  Synthetic oligonucleotide
tggcatgtatactaaaactt

SEQ ID NO: 1905 - DNA, 20 bp, Artificial sequence
  Synthetic oligonucleotide
tgggtacccctcctcactac

SEQ ID NO: 1906 - DNA, 20 bp, Artificial sequence
  Synthetic oligonucleotide
ttaaacataaatctccaact

SEQ ID NO: 1907 - DNA, 20 bp, Artificial sequence
  Synthetic oligonucleotide
cccatttttccttctactta

SEQ ID NO: 1908 - DNA, 20 bp, Artificial sequence
  Synthetic oligonucleotide
ttctaattttccccataaat

SEQ ID NO: 1909 - DNA, 20 bp, Artificial sequence
  Synthetic oligonucleotide
aaaccgaccataattctcaa

SEQ ID NO: 1910 - DNA, 20 bp, Artificial sequence
  Synthetic oligonucleotide
aatcttgtcccattctactt

SEQ ID NO: 1911 - DNA, 20 bp, Artificial sequence
  Synthetic oligonucleotide
aactttatctcttcagacca

SEQ ID NO: 1912 - DNA, 20 bp, Artificial sequence
  Synthetic oligonucleotide
tgcagatgccaccacgccta

SEQ ID NO: 1913 - DNA, 20 bp, Artificial sequence
  Synthetic oligonucleotide
agtaccttacatataagtat

SEQ ID NO: 1914 - DNA, 20 bp, Artificial sequence
  Synthetic oligonucleotide
tgaggaaatccctatttcca

SEQ ID NO: 1915 - DNA, 20 bp, Artificial sequence
  Synthetic oligonucleotide
cctaaaccacacaacacttt

SEQ ID NO: 1916 - DNA, 20 bp, Artificial sequence
  Synthetic oligonucleotide
gttaagcccattgaccataa

SEQ ID NO: 1917 - DNA, 20 bp, Artificial sequence
  Synthetic oligonucleotide
tggtaacaaacatttgccaa

SEQ ID NO: 1918 - DNA, 20 bp, Artificial sequence
  Synthetic oligonucleotide
cgagaactgacaattatgct

SEQ ID NO: 1919 - DNA, 20 bp, Artificial sequence
  Synthetic oligonucleotide
tgcagctcacccataactct

SEQ ID NO: 1920 - DNA, 20 bp, Artificial sequence
  Synthetic oligonucleotide
agttctttatataattttgt

SEQ ID NO: 1921 - DNA, 20 bp, Artificial sequence
  Synthetic oligonucleotide
tttcattacctccccaacta

SEQ ID NO: 1922 - DNA, 20 bp, Artificial sequence
  Synthetic oligonucleotide
gcaaggtccaatatatcgat

SEQ ID NO: 1923 - DNA, 20 bp, Artificial sequence
  Synthetic oligonucleotide
tgtcctaattattttactac

SEQ ID NO: 1924 - DNA, 20 bp, Artificial sequence
  Synthetic oligonucleotide
agtctggacatccagctgcc

SEQ ID NO: 1925 - DNA, 20 bp, Artificial sequence
  Synthetic oligonucleotide
ccaaaaccttcattcaacaa

SEQ ID NO: 1926 - DNA, 20 bp, Artificial sequence
  Synthetic oligonucleotide
actctcccacataccatgtc

SEQ ID NO: 1927 - DNA, 20 bp, Artificial sequence
  Synthetic oligonucleotide
cctgcaagcacacttaaggc

SEQ ID NO: 1928 - DNA, 20 bp, Artificial sequence
  Synthetic oligonucleotide
ctatacagtctttttacctc

SEQ ID NO: 1929 - DNA, 20 bp, Artificial sequence
  Synthetic oligonucleotide
tagcggtacttacacttccc

SEQ ID NO: 1930 - DNA, 20 bp, Artificial sequence
  Synthetic oligonucleotide
atcacatccccttatcccac

SEQ ID NO: 1931 - DNA, 20 bp, Artificial sequence
  Synthetic oligonucleotide
gtctatctaagaacatctta

SEQ ID NO: 1932 - DNA, 20 bp, Artificial sequence
  Synthetic oligonucleotide
gtttgcatatgtataatccc

SEQ ID NO: 1933 - DNA, 20 bp, Artificial sequence
  Synthetic oligonucleotide
ttgtctcaactcttttaatt

SEQ ID NO: 1934 - DNA, 20 bp, Artificial sequence
  Synthetic oligonucleotide
gataattacatttctgcatc

SEQ ID NO: 1935 - DNA, 20 bp, Artificial sequence
  Synthetic oligonucleotide
cacatcagaatctatttcta

SEQ ID NO: 1936 - DNA, 20 bp, Artificial sequence
  Synthetic oligonucleotide
acaaacaactgtactacata

SEQ ID NO: 1937 - DNA, 20 bp, Artificial sequence
  Synthetic oligonucleotide
cgtttcataatataacttca

SEQ ID NO: 1938 - DNA, 20 bp, Artificial sequence
  Synthetic oligonucleotide
agcccctattcacctttaca

SEQ ID NO: 1939 - DNA, 20 bp, Artificial sequence
  Synthetic oligonucleotide
gccgcatgcaccttcctcaa

SEQ ID NO: 1940 - DNA, 20 bp, Artificial sequence
  Synthetic oligonucleotide
gaccataattctcaatgggc

SEQ ID NO: 1941 - DNA, 20 bp, Artificial sequence
  Synthetic oligonucleotide
aactgtactacataaattct

SEQ ID NO: 1942 - DNA, 20 bp, Artificial sequence
  Synthetic oligonucleotide
gaagaatcacattacagact

SEQ ID NO: 1943 - DNA, 20 bp, Artificial sequence
  Synthetic oligonucleotide
gtctggacatccagctgccc

SEQ ID NO: 1944 - DNA, 20 bp, Artificial sequence
  Synthetic oligonucleotide
ctgcaagcacacttaaggcc

SEQ ID NO: 1945 - DNA, 20 bp, Artificial sequence
  Synthetic oligonucleotide
gtacccctcctcactacaaa

SEQ ID NO: 1946 - DNA, 20 bp, Artificial sequence
  Synthetic oligonucleotide
agttttctaataatatcctt

SEQ ID NO: 1947 - DNA, 20 bp, Artificial sequence
  Synthetic oligonucleotide
agcataacagtatctacact

SEQ ID NO: 1948 - DNA, 20 bp, Artificial sequence
  Synthetic oligonucleotide
gtgctccaacttcctagaga

SEQ ID NO: 1949 - DNA, 20 bp, Artificial sequence
  Synthetic oligonucleotide
gattttttttcctctttgaa

SEQ ID NO: 1950 - DNA, 20 bp, Artificial sequence
  Synthetic oligonucleotide
cattcaacaaataattctga

SEQ ID NO: 1951 - DNA, 20 bp, Artificial sequence
  Synthetic oligonucleotide
agcagagaaataaatgaccc

SEQ ID NO: 1952 - DNA, 20 bp, Artificial sequence
  Synthetic oligonucleotide
gctgttttacattttttttc

SEQ ID NO: 1953 - DNA, 20 bp, Artificial sequence
  Synthetic oligonucleotide
gtttcataatataacttcat

SEQ ID NO: 1954 - DNA, 20 bp, Artificial sequence
  Synthetic oligonucleotide
tctaagaacatcttaatttc

SEQ ID NO: 1955 - DNA, 20 bp, Artificial sequence
  Synthetic oligonucleotide
acccagacaattttatccaa

SEQ ID NO: 1956 - DNA, 20 bp, Artificial sequence
  Synthetic oligonucleotide
ttgcccagaaaccaacagct

SEQ ID NO: 1957 - DNA, 20 bp, Artificial sequence
  Synthetic oligonucleotide
ctttcatcttcattagaata

SEQ ID NO: 1958 - DNA, 20 bp, Artificial sequence
  Synthetic oligonucleotide
gaggaaatccctatttccaa

SEQ ID NO: 1959 - DNA, 20 bp, Artificial sequence
  Synthetic oligonucleotide
acttcaggtctacaacctaa

SEQ ID NO: 1960 - DNA, 20 bp, Artificial sequence
  Synthetic oligonucleotide
gcagctcacccataactcta

SEQ ID NO: 1961 - DNA, 20 bp, Artificial sequence
  Synthetic oligonucleotide
caaggcaacacctcttggtg

SEQ ID NO: 1962 - DNA, 20 bp, Artificial sequence
  Synthetic oligonucleotide
gtctcaactcttttaatttc

SEQ ID NO: 1963 - DNA, 20 bp, Artificial sequence
  Synthetic oligonucleotide
ataaaattatttctggctct

SEQ ID NO: 1964 - DNA, 20 bp, Artificial sequence
  Synthetic oligonucleotide
ttgtttttcatcatgtttta

SEQ ID NO: 1965 - DNA, 20 bp, Artificial sequence
  Synthetic oligonucleotide
acagacacagaaaactaaca

SEQ ID NO: 1966 - DNA, 20 bp, Artificial sequence
  Synthetic oligonucleotide
caaggtccaatatatcgatt

SEQ ID NO: 1967 - DNA, 20 bp, Artificial sequence
  Synthetic oligonucleotide
ttactacattttattttcta

SEQ ID NO: 1968 - DNA, 20 bp, Artificial sequence
  Synthetic oligonucleotide
agcggtacttacacttccct

SEQ ID NO: 1969 - DNA, 20 bp, Artificial sequence
  Synthetic oligonucleotide
ctaaaccacacaacactttg

SEQ ID NO: 1970 - DNA, 20 bp, Artificial sequence
  Synthetic oligonucleotide
tggaggccctcctctcataa

SEQ ID NO: 1971 - DNA, 20 bp, Artificial sequence
  Synthetic oligonucleotide
atcatcccatcctcttctgc

SEQ ID NO: 1972 - DNA, 20 bp, Artificial sequence
  Synthetic oligonucleotide
atgtttgtatccaacacata

SEQ ID NO: 1973 - DNA, 20 bp, Artificial sequence
  Synthetic oligonucleotide
atcttgtcccattctactta

SEQ ID NO: 1974 - DNA, 20 bp, Artificial sequence
  Synthetic oligonucleotide
ccatttttccttctacttaa

SEQ ID NO: 1975 - DNA, 20 bp, Artificial sequence
  Synthetic oligonucleotide
gctagcctctgctcaaccac

SEQ ID NO: 1976 - DNA, 20 bp, Artificial sequence
  Synthetic oligonucleotide
acatcagaatctatttctaa

SEQ ID NO: 1977 - DNA, 20 bp, Artificial sequence
  Synthetic oligonucleotide
actttatctcttcagaccaa

SEQ ID NO: 1978 - DNA, 20 bp, Artificial sequence
  Synthetic oligonucleotide
cagtaaaacaaacactgcca

SEQ ID NO: 1979 - DNA, 20 bp, Artificial sequence
  Synthetic oligonucleotide
ccagtggaacattcttcttc

SEQ ID NO: 1980 - DNA, 20 bp, Artificial sequence
  Synthetic oligonucleotide
atttggtgaccctattattt

SEQ ID NO: 1981 - DNA, 20 bp, Artificial sequence
  Synthetic oligonucleotide
tttgttacttccttttaaac

SEQ ID NO: 1982 - DNA, 20 bp, Artificial sequence
  Synthetic oligonucleotide
gcatgtatactaaaacttgt

SEQ ID NO: 1983 - DNA, 20 bp, Artificial sequence
  Synthetic oligonucleotide
aatctccaactagattgcaa

SEQ ID NO: 1984 - DNA, 20 bp, Artificial sequence
  Synthetic oligonucleotide
gcatctaacataaaagaaaa

SEQ ID NO: 1985 - DNA, 20 bp, Artificial sequence
  Synthetic oligonucleotide
gtagtgctgctttaactttt

SEQ ID NO: 1986 - DNA, 20 bp, Artificial sequence
  Synthetic oligonucleotide
tctctctactcctctgccac

SEQ ID NO: 1987 - DNA, 20 bp, Artificial sequence
  Synthetic oligonucleotide
ttcattacctccccaactaa

SEQ ID NO: 1988 - DNA, 20 bp, Artificial sequence
  Synthetic oligonucleotide
gaactgacaattatgcttca

SEQ ID NO: 1989 - DNA, 20 bp, Artificial sequence
  Synthetic oligonucleotide
ttctcgataatttttctctc

SEQ ID NO: 1990 - DNA, 20 bp, Artificial sequence
  Synthetic oligonucleotide
tggaccccttctcctgacca

SEQ ID NO: 1991 - DNA, 20 bp, Artificial sequence
  Synthetic oligonucleotide
ctttcaacctttcacattca

SEQ ID NO: 1992 - DNA, 20 bp, Artificial sequence
  Synthetic oligonucleotide
cagaggtaaaaataatgctt

SEQ ID NO: 1993 - DNA, 20 bp, Artificial sequence
  Synthetic oligonucleotide
tcatattttaacattccact

SEQ ID NO: 1994 - DNA, 20 bp, Artificial sequence
  Synthetic oligonucleotide
tcctacaattttccaatcaa

SEQ ID NO: 1995 - DNA, 20 bp, Artificial sequence
  Synthetic oligonucleotide
gcagatgccaccacgcctaa

SEQ ID NO: 1996 - DNA, 20 bp, Artificial sequence
  Synthetic oligonucleotide
agtaataaagaaaataggaa

SEQ ID NO: 1997 - DNA, 20 bp, Artificial sequence
  Synthetic oligonucleotide
tttcccccaaattttacatt

SEQ ID NO: 1998 - DNA, 20 bp, Artificial sequence
  Synthetic oligonucleotide
gaagtccctcaacattttta

SEQ ID NO: 1999 - DNA, 20 bp, Artificial sequence
  Synthetic oligonucleotide
gacatttacatttaaagatt

SEQ ID NO: 2000 - DNA, 20 bp, Artificial sequence
  Synthetic oligonucleotide
gcatacacaattactgaagc

SEQ ID NO: 2001 - DNA, 20 bp, Artificial sequence
  Synthetic oligonucleotide
tcacatccccttatcccact

SEQ ID NO: 2002 - DNA, 20 bp, Artificial sequence
  Synthetic oligonucleotide
aagcttatcttctcaggtgc

SEQ ID NO: 2003 - DNA, 20 bp, Artificial sequence
  Synthetic oligonucleotide
catcatgcaaatgaatggct

SEQ ID NO: 2004 - DNA, 20 bp, Artificial sequence
  Synthetic oligonucleotide
gcagttgtttttaaatgtcc

SEQ ID NO: 2005 - DNA, 20 bp, Artificial sequence
  Synthetic oligonucleotide
catcccacttttctctgctc

SEQ ID NO: 2006 - DNA, 20 bp, Artificial sequence
  Synthetic oligonucleotide
gcccctattcacctttacat

SEQ ID NO: 2007 - DNA, 20 bp, Artificial sequence
  Synthetic oligonucleotide
agcaaacttcattcaatgaa

SEQ ID NO: 2008 - DNA, 20 bp, Artificial sequence
  Synthetic oligonucleotide
cccattgaccataagtagca

SEQ ID NO: 2009 - DNA, 20 bp, Artificial sequence
  Synthetic oligonucleotide
acagattctatgtttaggcc

SEQ ID NO: 2010 - DNA, 20 bp, Artificial sequence
  Synthetic oligonucleotide
gcatatgtataatcccattt

SEQ ID NO: 2011 - DNA, 20 bp, Artificial sequence
  Synthetic oligonucleotide
tcagcagaaatgactactta

SEQ ID NO: 2012 - DNA, 20 bp, Artificial sequence
  Synthetic oligonucleotide
ttttggcctcaaactgcctt

SEQ ID NO: 2013 - DNA, 20 bp, Artificial sequence
  Synthetic oligonucleotide
gtaccttacatataagtatt

SEQ ID NO: 2014 - DNA, 20 bp, Artificial sequence
  Synthetic oligonucleotide
tcagtggtttcaaattagga

SEQ ID NO: 2015 - DNA, 20 bp, Artificial sequence
  Synthetic oligonucleotide
tacaatatttcttttacttc

SEQ ID NO: 2016 - DNA, 20 bp, Artificial sequence
  Synthetic oligonucleotide
tctaacataaaagaaaacca

SEQ ID NO: 2017 - DNA, 20 bp, Artificial sequence
  Synthetic oligonucleotide
tgtgtgagaaatataaattt

SEQ ID NO: 2018 - DNA, 20 bp, Artificial sequence
  Synthetic oligonucleotide
gttcaactgttttatggcct

SEQ ID NO: 2019 - DNA, 20 bp, Artificial sequence
  Synthetic oligonucleotide
tctcgataatttttctctca

SEQ ID NO: 2020 - DNA, 20 bp, Artificial sequence
  Synthetic oligonucleotide
ataacagtatctacactgct

SEQ ID NO: 2021 - DNA, 20 bp, Artificial sequence
  Synthetic oligonucleotide
actgtcattttttattggcc

SEQ ID NO: 2022 - DNA, 20 bp, Artificial sequence
  Synthetic oligonucleotide
tctggctctaatgatacaaa

SEQ ID NO: 2023 - DNA, 20 bp, Artificial sequence
  Synthetic oligonucleotide
atcccacttttctctgctca

SEQ ID NO: 2024 - DNA, 20 bp, Artificial sequence
  Synthetic oligonucleotide
tgtttaggccttcaccattc

SEQ ID NO: 2025 - DNA, 20 bp, Artificial sequence
  Synthetic oligonucleotide
tcctcactacaaaattacct

SEQ ID NO: 2026 - DNA, 20 bp, Artificial sequence
  Synthetic oligonucleotide
tactacattttattttctaa

SEQ ID NO: 2027 - DNA, 20 bp, Artificial sequence
  Synthetic oligonucleotide
aaactgccttattaagagta

SEQ ID NO: 2028 - DNA, 20 bp, Artificial sequence
  Synthetic oligonucleotide
atatgtataatcccatttaa

SEQ ID NO: 2029 - DNA, 20 bp, Artificial sequence
  Synthetic oligonucleotide
tttggtgaccctattattta

SEQ ID NO: 2030 - DNA, 20 bp, Artificial sequence
  Synthetic oligonucleotide
cgcatgcaccttcctcaaat

SEQ ID NO: 2031 - DNA, 20 bp, Artificial sequence
  Synthetic oligonucleotide
accataattctcaatgggct

SEQ ID NO: 2032 - DNA, 20 bp, Artificial sequence
  Synthetic oligonucleotide
ggaccccttctcctgaccaa

SEQ ID NO: 2033 - DNA, 20 bp, Artificial sequence
  Synthetic oligonucleotide
acatccccttatcccactct

SEQ ID NO: 2034 - DNA, 20 bp, Artificial sequence
  Synthetic oligonucleotide
acaatatttcttttacttct

SEQ ID NO: 2035 - DNA, 20 bp, Artificial sequence
  Synthetic oligonucleotide
agagaaactatcttctggga

SEQ ID NO: 2036 - DNA, 20 bp, Artificial sequence
  Synthetic oligonucleotide
ttgttacttccttttaaacc

SEQ ID NO: 2037 - DNA, 20 bp, Artificial sequence
  Synthetic oligonucleotide
tgctccaacttcctagagac

SEQ ID NO: 2038 - DNA, 20 bp, Artificial sequence
  Synthetic oligonucleotide
ctctgctcaaccacatagaa

SEQ ID NO: 2039 - DNA, 20 bp, Artificial sequence
  Synthetic oligonucleotide
ggaaggctaattttttgaat

SEQ ID NO: 2040 - DNA, 20 bp, Artificial sequence
  Synthetic oligonucleotide
ctgttttacattttttttcc

SEQ ID NO: 2041 - DNA, 20 bp, Artificial sequence
  Synthetic oligonucleotide
tcttgattccagatgaaggt

SEQ ID NO: 2042 - DNA, 20 bp, Artificial sequence
  Synthetic oligonucleotide
tccctcaacatttttaggga

SEQ ID NO: 2043 - DNA, 20 bp, Artificial sequence
  Synthetic oligonucleotide
ggagaaatacaatattgaca

SEQ ID NO: 2044 - DNA, 20 bp, Artificial sequence
  Synthetic oligonucleotide
gctgtgagattcatatgcca

SEQ ID NO: 2045 - DNA, 20 bp, Artificial sequence
  Synthetic oligonucleotide
ttcccccaaattttacattc

SEQ ID NO: 2046 - DNA, 20 bp, Artificial sequence
  Synthetic oligonucleotide
gacacagaaaactaacatct

SEQ ID NO: 2047 - DNA, 20 bp, Artificial sequence
  Synthetic oligonucleotide
tgcaagcacacttaaggcct

SEQ ID NO: 2048 - DNA, 20 bp, Artificial sequence
  Synthetic oligonucleotide
gcccagttaacaatatattt

SEQ ID NO: 2049 - DNA, 20 bp, Artificial sequence
  Synthetic oligonucleotide
gttttctaataatatccttt

SEQ ID NO: 2050 - DNA, 20 bp, Artificial sequence
  Synthetic oligonucleotide
cataatataacttcatgcca

SEQ ID NO: 2051 - DNA, 20 bp, Artificial sequence
  Synthetic oligonucleotide
tcatcccatcctcttctgca

SEQ ID NO: 2052 - DNA, 20 bp, Artificial sequence
  Synthetic oligonucleotide
gcagagaaataaatgaccca

SEQ ID NO: 2053 - DNA, 20 bp, Artificial sequence
  Synthetic oligonucleotide
gcagaaatgactacttaaac

SEQ ID NO: 2054 - DNA, 20 bp, Artificial sequence
  Synthetic oligonucleotide
caacaaataattctgagcac

SEQ ID NO: 2055 - DNA, 20 bp, Artificial sequence
  Synthetic oligonucleotide
agtaaaacaaacactgccac

SEQ ID NO: 2056 - DNA, 20 bp, Artificial sequence
  Synthetic oligonucleotide
tctcaactcttttaatttct

SEQ ID NO: 2057 - DNA, 20 bp, Artificial sequence
  Synthetic oligonucleotide
ttcatcttcattagaataat

SEQ ID NO: 2058 - DNA, 20 bp, Artificial sequence
  Synthetic oligonucleotide
cagtggaacattcttcttcc

SEQ ID NO: 2059 - DNA, 20 bp, Artificial sequence
  Synthetic oligonucleotide
tgctgctttaacttttagac

SEQ ID NO: 2060 - DNA, 20 bp, Artificial sequence
  Synthetic oligonucleotide
gatgtgttatttccatcaga

SEQ ID NO: 2061 - DNA, 20 bp, Artificial sequence
  Synthetic oligonucleotide
cagctgcccctcacacacct

SEQ ID NO: 2062 - DNA, 20 bp, Artificial sequence
  Synthetic oligonucleotide
gaggccctcctctcataatt

SEQ ID NO: 2063 - DNA, 20 bp, Artificial sequence
  Synthetic oligonucleotide
actgtactacataaattctt

SEQ ID NO: 2064 - DNA, 20 bp, Artificial sequence
  Synthetic oligonucleotide
actgagctccagccatgtct

SEQ ID NO: 2065 - DNA, 20 bp, Artificial sequence
  Synthetic oligonucleotide
tttccttctacttaattttc

SEQ ID NO: 2066 - DNA, 20 bp, Artificial sequence
  Synthetic oligonucleotide
cagctcacccataactctac

SEQ ID NO: 2067 - DNA, 20 bp, Artificial sequence
  Synthetic oligonucleotide
ctctctactcctctgccacc

SEQ ID NO: 2068 - DNA, 20 bp, Artificial sequence
  Synthetic oligonucleotide
caggtctacaacctaagtct

SEQ ID NO: 2069 - DNA, 20 bp, Artificial sequence
  Synthetic oligonucleotide
acctccccaactaaacaact

SEQ ID NO: 2070 - DNA, 20 bp, Artificial sequence
  Synthetic oligonucleotide
aggaaatccctatttccaaa

SEQ ID NO: 2071 - DNA, 20 bp, Artificial sequence
  Synthetic oligonucleotide
gctctggtaatatttactaa

SEQ ID NO: 2072 - DNA, 20 bp, Artificial sequence
  Synthetic oligonucleotide
gcccagaaaccaacagctaa

SEQ ID NO: 2073 - DNA, 20 bp, Artificial sequence
  Synthetic oligonucleotide
ctacaattttccaatcaata

SEQ ID NO: 2074 - DNA, 20 bp, Artificial sequence
  Synthetic oligonucleotide
tagcaactacttccccacct

SEQ ID NO: 2075 - DNA, 20 bp, Artificial sequence
  Synthetic oligonucleotide
tgtttgtatccaacacatat

SEQ ID NO: 2076 - DNA, 20 bp, Artificial sequence
  Synthetic oligonucleotide
cccctattcacctttacatt

SEQ ID NO: 2077 - DNA, 20 bp, Artificial sequence
  Synthetic oligonucleotide
aaaccacacaacactttgca

SEQ ID NO: 2078 - DNA, 20 bp, Artificial sequence
  Synthetic oligonucleotide
attgcaagttccttaagggc

SEQ ID NO: 2079 - DNA, 20 bp, Artificial sequence
  Synthetic oligonucleotide
cccagacaattttatccaat

SEQ ID NO: 2080 - DNA, 20 bp, Artificial sequence
  Synthetic oligonucleotide
tcttgtcccattctacttat

SEQ ID NO: 2081 - DNA, 20 bp, Artificial sequence
  Synthetic oligonucleotide
taccttacatataagtattc

SEQ ID NO: 2082 - DNA, 20 bp, Artificial sequence
  Synthetic oligonucleotide
ctaagaacatcttaatttcc

SEQ ID NO: 2083 - DNA, 20 bp, Artificial sequence
  Synthetic oligonucleotide
cagtggtttcaaattaggaa

SEQ ID NO: 2084 - DNA, 20 bp, Artificial sequence
  Synthetic oligonucleotide
gttttcctgattcattgaac

SEQ ID NO: 2085 - DNA, 20 bp, Artificial sequence
  Synthetic oligonucleotide
agaggtaaaaataatgctta

SEQ ID NO: 2086 - DNA, 20 bp, Artificial sequence
  Synthetic oligonucleotide
gcggtacttacacttccctt

SEQ ID NO: 2087 - DNA, 20 bp, Artificial sequence
  Synthetic oligonucleotide
tctatttctaaaaatccaga

SEQ ID NO: 2088 - DNA, 20 bp, Artificial sequence
  Synthetic oligonucleotide
atgtatactaaaacttgtac

SEQ ID NO: 2089 - DNA, 20 bp, Artificial sequence
  Synthetic oligonucleotide
cagttgtttttaaatgtcct

SEQ ID NO: 2090 - DNA, 20 bp, Artificial sequence
  Synthetic oligonucleotide
caggtgcaaaacaaagtcaa

SEQ ID NO: 2091 - DNA, 20 bp, Artificial sequence
  Synthetic oligonucleotide
aagaatcacattacagactt

SEQ ID NO: 2092 - DNA, 20 bp, Artificial sequence
  Synthetic oligonucleotide
ttcaacctttcacattcatt

SEQ ID NO: 2093 - DNA, 20 bp, Artificial sequence
  Synthetic oligonucleotide
aatatttcttttacttctgc

SEQ ID NO: 2094 - DNA, 20 bp, Artificial sequence
  Synthetic oligonucleotide
ctgtcattttttattggcct

SEQ ID NO: 2095 - DNA, 20 bp, Artificial sequence
  Synthetic oligonucleotide
gtatccaacacatatatatc

SEQ ID NO: 2096 - DNA, 20 bp, Artificial sequence
  Synthetic oligonucleotide
cctcactacaaaattacctc

SEQ ID NO: 2097 - DNA, 20 bp, Artificial sequence
  Synthetic oligonucleotide
cttgtacacactctcagatc

SEQ ID NO: 2098 - DNA, 20 bp, Artificial sequence
  Synthetic oligonucleotide
ttaagagtatcacttacagc

SEQ ID NO: 2099 - DNA, 20 bp, Artificial sequence
  Synthetic oligonucleotide
tacaattttccaatcaatat

SEQ ID NO: 2100 - DNA, 20 bp, Artificial sequence
  Synthetic oligonucleotide
ttagggatcatctttctggc

SEQ ID NO: 2101 - DNA, 20 bp, Artificial sequence
  Synthetic oligonucleotide
tgtgagaaatataaatttgt

SEQ ID NO: 2102 - DNA, 20 bp, Artificial sequence
  Synthetic oligonucleotide
gcaactacttccccaccttt

SEQ ID NO: 2103 - DNA, 20 bp, Artificial sequence
  Synthetic oligonucleotide
agcagcagtctaacactgaa

SEQ ID NO: 2104 - DNA, 20 bp, Artificial sequence
  Synthetic oligonucleotide
ttgcaagttccttaagggca

SEQ ID NO: 2105 - DNA, 20 bp, Artificial sequence
  Synthetic oligonucleotide
gctcaggatctcacaaacct

SEQ ID NO: 2106 - DNA, 20 bp, Artificial sequence
  Synthetic oligonucleotide
tgttacttccttttaaacct

SEQ ID NO: 2107 - DNA, 20 bp, Artificial sequence
  Synthetic oligonucleotide
gtaaaacaaacactgccaca

SEQ ID NO: 2108 - DNA, 20 bp, Artificial sequence
  Synthetic oligonucleotide
ctaacataaaagaaaaccaa

SEQ ID NO: 2109 - DNA, 20 bp, Artificial sequence
  Synthetic oligonucleotide
cctcctctcataattaggtt

SEQ ID NO: 2110 - DNA, 20 bp, Artificial sequence
  Synthetic oligonucleotide
gtttaggccttcaccattca

SEQ ID NO: 2111 - DNA, 20 bp, Artificial sequence
  Synthetic oligonucleotide
gagaaactatcttctgggaa

SEQ ID NO: 2112 - DNA, 20 bp, Artificial sequence
  Synthetic oligonucleotide
gtacttacacttcccttctc

SEQ ID NO: 2113 - DNA, 20 bp, Artificial sequence
  Synthetic oligonucleotide
tgtgaagaaatctgctgtta

SEQ ID NO: 2114 - DNA, 20 bp, Artificial sequence
  Synthetic oligonucleotide
tcaacctttcacattcattt

SEQ ID NO: 2115 - DNA, 20 bp, Artificial sequence
  Synthetic oligonucleotide
ttggtgaccctattatttat

SEQ ID NO: 2116 - DNA, 20 bp, Artificial sequence
  Synthetic oligonucleotide
tttctaataatatcctttgc

SEQ ID NO: 2117 - DNA, 20 bp, Artificial sequence
  Synthetic oligonucleotide
agtggaacattcttcttcct

SEQ ID NO: 2118 - DNA, 20 bp, Artificial sequence
  Synthetic oligonucleotide
ctgtactacataaattcttt

SEQ ID NO: 2119 - DNA, 20 bp, Artificial sequence
  Synthetic oligonucleotide
accaacagctaaaagcatct

SEQ ID NO: 2120 - DNA, 20 bp, Artificial sequence
  Synthetic oligonucleotide
aaccacacaacactttgcaa

SEQ ID NO: 2121 - DNA, 20 bp, Artificial sequence
  Synthetic oligonucleotide
acttcatgccatctttgcct

SEQ ID NO: 2122 - DNA, 20 bp, Artificial sequence
  Synthetic oligonucleotide
aggtctacaacctaagtcta

SEQ ID NO: 2123 - DNA, 20 bp, Artificial sequence
  Synthetic oligonucleotide
tgtatgttcatagatagata

SEQ ID NO: 2124 - DNA, 20 bp, Artificial sequence
  Synthetic oligonucleotide
gtttttaaatgtcctagtct

SEQ ID NO: 2125 - DNA, 20 bp, Artificial sequence
  Synthetic oligonucleotide
caggctctatctccacaggc

SEQ ID NO: 2126 - DNA, 20 bp, Artificial sequence
  Synthetic oligonucleotide
ctgcccctcacacacctgga

SEQ ID NO: 2127 - DNA, 20 bp, Artificial sequence
  Synthetic oligonucleotide
catccccttatcccactcta

SEQ ID NO: 2128 - DNA, 20 bp, Artificial sequence
  Synthetic oligonucleotide
gtcaagactccatctaccca

SEQ ID NO: 2129 - DNA, 20 bp, Artificial sequence
  Synthetic oligonucleotide
tcccccaaattttacattca

SEQ ID NO: 2130 - DNA, 20 bp, Artificial sequence
  Synthetic oligonucleotide
ctcaactcttttaatttctt

SEQ ID NO: 2131 - DNA, 20 bp, Artificial sequence
  Synthetic oligonucleotide
gcaagcacacttaaggcctc

SEQ ID NO: 2132 - DNA, 20 bp, Artificial sequence
  Synthetic oligonucleotide
tttgtctcttttctttcact

SEQ ID NO: 2133 - DNA, 20 bp, Artificial sequence
  Synthetic oligonucleotide
tataagtattcaataagagt

SEQ ID NO: 2134 - DNA, 20 bp, Artificial sequence
  Synthetic oligonucleotide
gttttagttacaactcgaga

SEQ ID NO: 2135 - DNA, 20 bp, Artificial sequence
  Synthetic oligonucleotide
ctctactcctctgccaccaa

SEQ ID NO: 2136 - DNA, 20 bp, Artificial sequence
  Synthetic oligonucleotide
ctatttctaaaaatccagaa

SEQ ID NO: 2137 - DNA, 20 bp, Artificial sequence
  Synthetic oligonucleotide
gtgttatttccatcagatgc

SEQ ID NO: 2138 - DNA, 20 bp, Artificial sequence
  Synthetic oligonucleotide
ccctattcacctttacattt

SEQ ID NO: 2139 - DNA, 20 bp, Artificial sequence
  Synthetic oligonucleotide
ttccttctacttaattttcc

SEQ ID NO: 2140 - DNA, 20 bp, Artificial sequence
  Synthetic oligonucleotide
agagaaataaatgacccata

SEQ ID NO: 2141 - DNA, 20 bp, Artificial sequence
  Synthetic oligonucleotide
tctgctcaaccacatagaac

SEQ ID NO: 2142 - DNA, 20 bp, Artificial sequence
  Synthetic oligonucleotide
gcatgcaccttcctcaaatc

SEQ ID NO: 2143 - DNA, 20 bp, Artificial sequence
  Synthetic oligonucleotide
catcagtttttttctcgata

SEQ ID NO: 2144 - DNA, 20 bp, Artificial sequence
  Synthetic oligonucleotide
tacagtctttttacctcagc

SEQ ID NO: 2145 - DNA, 20 bp, Artificial sequence
  Synthetic oligonucleotide
tcctgattcattgaactatc

SEQ ID NO: 2146 - DNA, 20 bp, Artificial sequence
  Synthetic oligonucleotide
cccagttaacaatatattta

SEQ ID NO: 2147 - DNA, 20 bp, Artificial sequence
  Synthetic oligonucleotide
tggtaatatttactaaagaa

SEQ ID NO: 2148 - DNA, 20 bp, Artificial sequence
  Synthetic oligonucleotide
taagaacatcttaatttcct

SEQ ID NO: 2149 - DNA, 20 bp, Artificial sequence
  Synthetic oligonucleotide
agctcacccataactctaca

SEQ ID NO: 2150 - DNA, 20 bp, Artificial sequence
  Synthetic oligonucleotide
actgagatcattttaaggac

SEQ ID NO: 2151 - DNA, 20 bp, Artificial sequence
  Synthetic oligonucleotide
gcaagtatccttcagcactt

SEQ ID NO: 2152 - DNA, 20 bp, Artificial sequence
  Synthetic oligonucleotide
ccataattctcaatgggcta

SEQ ID NO: 2153 - DNA, 20 bp, Artificial sequence
  Synthetic oligonucleotide
tcttcattagaataatttcc

SEQ ID NO: 2154 - DNA, 20 bp, Artificial sequence
  Synthetic oligonucleotide
cccaactaaacaactttttg

SEQ ID NO: 2155 - DNA, 20 bp, Artificial sequence
  Synthetic oligonucleotide
acacagaaaactaacatcta

SEQ ID NO: 2156 - DNA, 20 bp, Artificial sequence
  Synthetic oligonucleotide
ccagacaattttatccaatt

SEQ ID NO: 2157 - DNA, 20 bp, Artificial sequence
  Synthetic oligonucleotide
gctgctttaacttttagaca

SEQ ID NO: 2158 - DNA, 20 bp, Artificial sequence
  Synthetic oligonucleotide
gctccaacttcctagagacc

SEQ ID NO: 2159 - DNA, 20 bp, Artificial sequence
  Synthetic oligonucleotide
attacagactttatttactt

SEQ ID NO: 2160 - DNA, 20 bp, Artificial sequence
  Synthetic oligonucleotide
ctctaatgatacaaatcttt

SEQ ID NO: 2161 - DNA, 20 bp, Artificial sequence
  Synthetic oligonucleotide
tcccacttttctctgctcac

SEQ ID NO: 2162 - DNA, 20 bp, Artificial sequence
  Synthetic oligonucleotide
gtaaaaataatgcttacttc

SEQ ID NO: 2163 - DNA, 20 bp, Artificial sequence
  Synthetic oligonucleotide
atccctatttccaaaacaac

SEQ ID NO: 2164 - DNA, 20 bp, Artificial sequence
  Synthetic oligonucleotide
gttttacattttttttccaa

SEQ ID NO: 2165 - DNA, 20 bp, Artificial sequence
  Synthetic oligonucleotide
atgtataatcccatttaaga

SEQ ID NO: 2166 - DNA, 20 bp, Artificial sequence
  Synthetic oligonucleotide
ctggaattcagaaaaagcta

SEQ ID NO: 2167 - DNA, 20 bp, Artificial sequence
  Synthetic oligonucleotide
acattttattttctaagctc

SEQ ID NO: 2168 - DNA, 20 bp, Artificial sequence
  Synthetic oligonucleotide
taacagtatctacactgctc

SEQ ID NO: 2169 - DNA, 20 bp, Artificial sequence
  Synthetic oligonucleotide
ttgtcccattctacttattc

SEQ ID NO: 2170 - DNA, 20 bp, Artificial sequence
  Synthetic oligonucleotide
ctccaacttcctagagacct

SEQ ID NO: 2171 - DNA, 20 bp, Artificial sequence
  Synthetic oligonucleotide
tgtataatcccatttaagaa

SEQ ID NO: 2172 - DNA, 20 bp, Artificial sequence
  Synthetic oligonucleotide
ccagttaacaatatatttac

SEQ ID NO: 2173 - DNA, 20 bp, Artificial sequence
  Synthetic oligonucleotide
aagtctagttcctaaaacta

SEQ ID NO: 2174 - DNA, 20 bp, Artificial sequence
  Synthetic oligonucleotide
ccttatcccactctagaatt

SEQ ID NO: 2175 - DNA, 20 bp, Artificial sequence
  Synthetic oligonucleotide
taagtattcaataagagttt

SEQ ID NO: 2176 - DNA, 20 bp, Artificial sequence
  Synthetic oligonucleotide
actaaagaatataattcagc

SEQ ID NO: 2177 - DNA, 20 bp, Artificial sequence
  Synthetic oligonucleotide
aggctctatctccacaggct

SEQ ID NO: 2178 - DNA, 20 bp, Artificial sequence
  Synthetic oligonucleotide
ccggagggcctaatgcctta

SEQ ID NO: 2179 - DNA, 20 bp, Artificial sequence
  Synthetic oligonucleotide
ttacagactttatttactta

SEQ ID NO: 2180 - DNA, 20 bp, Artificial sequence
  Synthetic oligonucleotide
atcagtttttttctcgataa

SEQ ID NO: 2181 - DNA, 20 bp, Artificial sequence
  Synthetic oligonucleotide
ctcctctcataattaggtta

SEQ ID NO: 2182 - DNA, 20 bp, Artificial sequence
  Synthetic oligonucleotide
aactaaacaactttttgggc

SEQ ID NO: 2183 - DNA, 20 bp, Artificial sequence
  Synthetic oligonucleotide
aatgatacaaatctttcata

SEQ ID NO: 2184 - DNA, 20 bp, Artificial sequence
  Synthetic oligonucleotide
tcctctgccaccaatgtata

SEQ ID NO: 2185 - DNA, 20 bp, Artificial sequence
  Synthetic oligonucleotide
tacttacacttcccttctcc

SEQ ID NO: 2186 - DNA, 20 bp, Artificial sequence
  Synthetic oligonucleotide
ctattcacctttacattttc

SEQ ID NO: 2187 - DNA, 20 bp, Artificial sequence
  Synthetic oligonucleotide
acagtctttttacctcagca

SEQ ID NO: 2188 - DNA, 20 bp, Artificial sequence
  Synthetic oligonucleotide
tgtcctagtctttaatatcc

SEQ ID NO: 2189 - DNA, 20 bp, Artificial sequence
  Synthetic oligonucleotide
attttattttctaagctctt

SEQ ID NO: 2190 - DNA, 20 bp, Artificial sequence
  Synthetic oligonucleotide
accacacaacactttgcaat

SEQ ID NO: 2191 - DNA, 20 bp, Artificial sequence
  Synthetic oligonucleotide
tgcaagttccttaagggcag

SEQ ID NO: 2192 - DNA, 20 bp, Artificial sequence
  Synthetic oligonucleotide
tcaagactccatctacccag

SEQ ID NO: 2193 - DNA, 20 bp, Artificial sequence
  Synthetic oligonucleotide
tagggatcatctttctggca

SEQ ID NO: 2194 - DNA, 20 bp, Artificial sequence
  Synthetic oligonucleotide
aacagtatctacactgctct

SEQ ID NO: 2195 - DNA, 20 bp, Artificial sequence
  Synthetic oligonucleotide
tctcttttctttcactggtc

SEQ ID NO: 2196 - DNA, 20 bp, Artificial sequence
  Synthetic oligonucleotide
ttcttgacttacaatggtgt

SEQ ID NO: 2197 - DNA, 20 bp, Artificial sequence
  Synthetic oligonucleotide
taggccttcaccattcagtg

SEQ ID NO: 2198 - DNA, 20 bp, Artificial sequence
  Synthetic oligonucleotide
acttaaggcctctgttctca

SEQ ID NO: 2199 - DNA, 20 bp, Artificial sequence
  Synthetic oligonucleotide
ctgctttaacttttagacaa

SEQ ID NO: 2200 - DNA, 20 bp, Artificial sequence
  Synthetic oligonucleotide
gcccctcacacacctggatc

SEQ ID NO: 2201 - DNA, 20 bp, Artificial sequence
  Synthetic oligonucleotide
acaattttccaatcaatata

SEQ ID NO: 2202 - DNA, 20 bp, Artificial sequence
  Synthetic oligonucleotide
ttgttgagtttccttaagat

SEQ ID NO: 2203 - DNA, 20 bp, Artificial sequence
  Synthetic oligonucleotide
ttttctctgctcactaggat

SEQ ID NO: 2204 - DNA, 20 bp, Artificial sequence
  Synthetic oligonucleotide
gctctgttaaaaatagctgt

SEQ ID NO: 2205 - DNA, 20 bp, Artificial sequence
  Synthetic oligonucleotide
atctcacaaacctactgaga

SEQ ID NO: 2206 - DNA, 20 bp, Artificial sequence
  Synthetic oligonucleotide
ttctaataatatcctttgcc

SEQ ID NO: 2207 - DNA, 20 bp, Artificial sequence
  Synthetic oligonucleotide
ctcactacaaaattacctct

SEQ ID NO: 2208 - DNA, 20 bp, Artificial sequence
  Synthetic oligonucleotide
tccctatttccaaaacaacc

SEQ ID NO: 2209 - DNA, 20 bp, Artificial sequence
  Synthetic oligonucleotide
acactgccacaaacaccctc

SEQ ID NO: 2210 - DNA, 20 bp, Artificial sequence
  Synthetic oligonucleotide
ccttcagcacttttacacca

SEQ ID NO: 2211 - DNA, 20 bp, Artificial sequence
  Synthetic oligonucleotide
atatttcttttacttctgcc

SEQ ID NO: 2212 - DNA, 20 bp, Artificial sequence
  Synthetic oligonucleotide
tgtcccattctacttattca

SEQ ID NO: 2213 - DNA, 20 bp, Artificial sequence
  Synthetic oligonucleotide
tcaatcctttcttctacacc

SEQ ID NO: 2214 - DNA, 20 bp, Artificial sequence
  Synthetic oligonucleotide
ggtggctcatatcaatatgc

SEQ ID NO: 2215 - DNA, 20 bp, Artificial sequence
  Synthetic oligonucleotide
tgttatttccatcagatgct

SEQ ID NO: 2216 - DNA, 20 bp, Artificial sequence
  Synthetic oligonucleotide
tgagatcattttaaggactc

SEQ ID NO: 2217 - DNA, 20 bp, Artificial sequence
  Synthetic oligonucleotide
acttccttttaaaccttata

SEQ ID NO: 2218 - DNA, 20 bp, Artificial sequence
  Synthetic oligonucleotide
cacccataactctacagtgc

SEQ ID NO: 2219 - DNA, 20 bp, Artificial sequence
  Synthetic oligonucleotide
aactctcattataaacagaa

SEQ ID NO: 2220 - DNA, 20 bp, Artificial sequence
  Synthetic oligonucleotide
catgcaccttcctcaaatcc

SEQ ID NO: 2221 - DNA, 20 bp, Artificial sequence
  Synthetic oligonucleotide
cttcatgccatctttgcctc

SEQ ID NO: 2222 - DNA, 20 bp, Artificial sequence
  Synthetic oligonucleotide
actcatagttcagctacctc

SEQ ID NO: 2223 - DNA, 20 bp, Artificial sequence
  Synthetic oligonucleotide
ttcattagaataatttcctg

SEQ ID NO: 2224 - DNA, 20 bp, Artificial sequence
  Synthetic oligonucleotide
tagattttttccacctgcgg

SEQ ID NO: 2225 - DNA, 20 bp, Artificial sequence
  Synthetic oligonucleotide
tcaagcctaattcattagct

SEQ ID NO: 2226 - DNA, 20 bp, Artificial sequence
  Synthetic oligonucleotide
ttgtacacactctcagatct

SEQ ID NO: 2227 - DNA, 20 bp, Artificial sequence
  Synthetic oligonucleotide
cacagaaaactaacatctaa

SEQ ID NO: 2228 - DNA, 20 bp, Artificial sequence
  Synthetic oligonucleotide
gctaaccaccattaacaaca

SEQ ID NO: 2229 - DNA, 20 bp, Artificial sequence
  Synthetic oligonucleotide
cccccaaattttacattcaa

SEQ ID NO: 2230 - DNA, 20 bp, Artificial sequence
  Synthetic oligonucleotide
tgatgaccacatctatgcta

SEQ ID NO: 2231 - DNA, 20 bp, Artificial sequence
  Synthetic oligonucleotide
acaattttatccaattatcc

SEQ ID NO: 2232 - DNA, 20 bp, Artificial sequence
  Synthetic oligonucleotide
tgagaaatataaatttgttt

SEQ ID NO: 2233 - DNA, 20 bp, Artificial sequence
  Synthetic oligonucleotide
tatccaacacatatatatcc

SEQ ID NO: 2234 - DNA, 20 bp, Artificial sequence
  Synthetic oligonucleotide
gctaaaagcatctcagttca

SEQ ID NO: 2235 - DNA, 20 bp, Artificial sequence
  Synthetic oligonucleotide
cttttgtcccataagaacca

SEQ ID NO: 2236 - DNA, 20 bp, Artificial sequence
  Synthetic oligonucleotide
aagaacatcttaatttcctt

SEQ ID NO: 2237 - DNA, 20 bp, Artificial sequence
  Synthetic oligonucleotide
tcaactcttttaatttcttt

SEQ ID NO: 2238 - DNA, 20 bp, Artificial sequence
  Synthetic oligonucleotide
tccttctacttaattttcct

SEQ ID NO: 2239 - DNA, 20 bp, Artificial sequence
  Synthetic oligonucleotide
ctgctcaaccacatagaaca

SEQ ID NO: 2240 - DNA, 20 bp, Artificial sequence
  Synthetic oligonucleotide
gcagatgaatttcacattga

SEQ ID NO: 2241 - DNA, 20 bp, Artificial sequence
  Synthetic oligonucleotide
agagtatcacttacagctgt

SEQ ID NO: 2242 - DNA, 20 bp, Artificial sequence
  Synthetic oligonucleotide
tggtgaccctattatttatt

SEQ ID NO: 2243 - DNA, 20 bp, Artificial sequence
  Synthetic oligonucleotide
gtggaacattcttcttcctc

SEQ ID NO: 2244 - DNA, 20 bp, Artificial sequence
  Synthetic oligonucleotide
ttgatgcctttctcttgcta

SEQ ID NO: 2245 - DNA, 20 bp, Artificial sequence
  Synthetic oligonucleotide
tcaatgggctacattaagct

SEQ ID NO: 2246 - DNA, 20 bp, Artificial sequence
  Synthetic oligonucleotide
acctttcacattcattttca

SEQ ID NO: 2247 - DNA, 20 bp, Artificial sequence
  Synthetic oligonucleotide
tacacactctcagatcttaa

SEQ ID NO: 2248 - DNA, 20 bp, Artificial sequence
  Synthetic oligonucleotide
ctagagacctaacaatttca

SEQ ID NO: 2249 - DNA, 20 bp, Artificial sequence
  Synthetic oligonucleotide
ccctatttccaaaacaacca

SEQ ID NO: 2250 - DNA, 20 bp, Artificial sequence
  Synthetic oligonucleotide
tggaacattcttcttcctct

SEQ ID NO: 2251 - DNA, 20 bp, Artificial sequence
  Synthetic oligonucleotide
ttctggatcttatcttcctt

SEQ ID NO: 2252 - DNA, 20 bp, Artificial sequence
  Synthetic oligonucleotide
aaacacttagattactgcct

SEQ ID NO: 2253 - DNA, 20 bp, Artificial sequence
  Synthetic oligonucleotide
ggtgaccctattatttattc

SEQ ID NO: 2254 - DNA, 20 bp, Artificial sequence
  Synthetic oligonucleotide
cagaaaactaacatctaata

SEQ ID NO: 2255 - DNA, 20 bp, Artificial sequence
  Synthetic oligonucleotide
caacagataataatgtgctt

SEQ ID NO: 2256 - DNA, 20 bp, Artificial sequence
  Synthetic oligonucleotide
gattttttccacctgcggct

SEQ ID NO: 2257 - DNA, 20 bp, Artificial sequence
  Synthetic oligonucleotide
ggcctgtaatttcattttta

SEQ ID NO: 2258 - DNA, 20 bp, Artificial sequence
  Synthetic oligonucleotide
ctcttttctttcactggtcc

SEQ ID NO: 2259 - DNA, 20 bp, Artificial sequence
  Synthetic oligonucleotide
taatgcttacttctacacct

SEQ ID NO: 2260 - DNA, 20 bp, Artificial sequence
  Synthetic oligonucleotide
tcactacaaaattacctctc

SEQ ID NO: 2261 - DNA, 20 bp, Artificial sequence
  Synthetic oligonucleotide
tctttgatgcactctagcac

SEQ ID NO: 2262 - DNA, 20 bp, Artificial sequence
  Synthetic oligonucleotide
aaacttaatataatttcaac

SEQ ID NO: 2263 - DNA, 20 bp, Artificial sequence
  Synthetic oligonucleotide
gtataatcccatttaagaac

SEQ ID NO: 2264 - DNA, 20 bp, Artificial sequence
  Synthetic oligonucleotide
cgataatttttctctcagca

SEQ ID NO: 2265 - DNA, 20 bp, Artificial sequence
  Synthetic oligonucleotide
aaggtaaattcctttttgga

SEQ ID NO: 2266 - DNA, 20 bp, Artificial sequence
  Synthetic oligonucleotide
tcctagtctttaatatccgg

SEQ ID NO: 2267 - DNA, 20 bp, Artificial sequence
  Synthetic oligonucleotide
cagatgaatttcacattgaa

SEQ ID NO: 2268 - DNA, 20 bp, Artificial sequence
  Synthetic oligonucleotide
atccaacacatatatatcca

SEQ ID NO: 2269 - DNA, 20 bp, Artificial sequence
  Synthetic oligonucleotide
agttcaagcccagaactcta

SEQ ID NO: 2270 - DNA, 20 bp, Artificial sequence
  Synthetic oligonucleotide
aaccaccattaacaacaaca

SEQ ID NO: 2271 - DNA, 20 bp, Artificial sequence
  Synthetic oligonucleotide
ttagaataatttcctgaatc

SEQ ID NO: 2272 - DNA, 20 bp, Artificial sequence
  Synthetic oligonucleotide
cttccttttaaaccttataa

SEQ ID NO: 2273 - DNA, 20 bp, Artificial sequence
  Synthetic oligonucleotide
atcccactctagaattctta

SEQ ID NO: 2274 - DNA, 20 bp, Artificial sequence
  Synthetic oligonucleotide
gttctcagcacatctacttg

SEQ ID NO: 2275 - DNA, 20 bp, Artificial sequence
  Synthetic oligonucleotide
tttttctcgataatttttct

SEQ ID NO: 2276 - DNA, 20 bp, Artificial sequence
  Synthetic oligonucleotide
aataagagtttctatagtaa

SEQ ID NO: 2277 - DNA, 20 bp, Artificial sequence
  Synthetic oligonucleotide
cagttaacaatatatttaca

SEQ ID NO: 2278 - DNA, 20 bp, Artificial sequence
  Synthetic oligonucleotide
atttcttttacttctgcctt

SEQ ID NO: 2279 - DNA, 20 bp, Artificial sequence
  Synthetic oligonucleotide
aatctttcatataaattctt

SEQ ID NO: 2280 - DNA, 20 bp, Artificial sequence
  Synthetic oligonucleotide
caagcctaattcattagctg

SEQ ID NO: 2281 - DNA, 20 bp, Artificial sequence
  Synthetic oligonucleotide
ccccacttttttttgagata

SEQ ID NO: 2282 - DNA, 20 bp, Artificial sequence
  Synthetic oligonucleotide
cccctcacacacctggatca

SEQ ID NO: 2283 - DNA, 20 bp, Artificial sequence
  Synthetic oligonucleotide
atgcaccttcctcaaatcca

SEQ ID NO: 2284 - DNA, 20 bp, Artificial sequence
  Synthetic oligonucleotide
ttttgtcccataagaaccaa

SEQ ID NO: 2285 - DNA, 20 bp, Artificial sequence
  Synthetic oligonucleotide
gccttcaccattcagtgctt

SEQ ID NO: 2286 - DNA, 20 bp, Artificial sequence
  Synthetic oligonucleotide
gctaactgctttcaattttt

SEQ ID NO: 2287 - DNA, 20 bp, Artificial sequence
  Synthetic oligonucleotide
gagatcattttaaggactca

SEQ ID NO: 2288 - DNA, 20 bp, Artificial sequence
  Synthetic oligonucleotide
acttacacttcccttctccc

SEQ ID NO: 2289 - DNA, 20 bp, Artificial sequence
  Synthetic oligonucleotide
ggctctatctccacaggctc

SEQ ID NO: 2290 - DNA, 20 bp, Artificial sequence
  Synthetic oligonucleotide
cagctagcaactttttctta

SEQ ID NO: 2291 - DNA, 20 bp, Artificial sequence
  Synthetic oligonucleotide
gttcagctacctcctgcttc

SEQ ID NO: 2292 - DNA, 20 bp, Artificial sequence
  Synthetic oligonucleotide
tcccattctacttattcagc

SEQ ID NO: 2293 - DNA, 20 bp, Artificial sequence
  Synthetic oligonucleotide
agaacatcttaatttcctta

SEQ ID NO: 2294 - DNA, 20 bp, Artificial sequence
  Synthetic oligonucleotide
ttggcatgaaatatattcaa

SEQ ID NO: 2295 - DNA, 20 bp, Artificial sequence
  Synthetic oligonucleotide
ggtgagagtttataaatttt

SEQ ID NO: 2296 - DNA, 20 bp, Artificial sequence
  Synthetic oligonucleotide
ggtcttgcaagcattattta

SEQ ID NO: 2297 - DNA, 20 bp, Artificial sequence
  Synthetic oligonucleotide
aagggcagaatttatatcgc

SEQ ID NO: 2298 - DNA, 20 bp, Artificial sequence
  Synthetic oligonucleotide
gcctaatgccttatttcttc

SEQ ID NO: 2299 - DNA, 20 bp, Artificial sequence
  Synthetic oligonucleotide
caattttccaatcaatataa

SEQ ID NO: 2300 - DNA, 20 bp, Artificial sequence
  Synthetic oligonucleotide
accaatgtatatctttcttt

SEQ ID NO: 2301 - DNA, 20 bp, Artificial sequence
  Synthetic oligonucleotide
gttgagtttccttaagatca

SEQ ID NO: 2302 - DNA, 20 bp, Artificial sequence
  Synthetic oligonucleotide
actccatctacccagaggca

SEQ ID NO: 2303 - DNA, 20 bp, Artificial sequence
  Synthetic oligonucleotide
actaaacaactttttgggca

SEQ ID NO: 2304 - DNA, 20 bp, Artificial sequence
  Synthetic oligonucleotide
ttttatccaattatccatcc

SEQ ID NO: 2305 - DNA, 20 bp, Artificial sequence
  Synthetic oligonucleotide
agggatcatctttctggcat

SEQ ID NO: 2306 - DNA, 20 bp, Artificial sequence
  Synthetic oligonucleotide
tattcacctttacattttca

SEQ ID NO: 2307 - DNA, 20 bp, Artificial sequence
  Synthetic oligonucleotide
gccacaaacaccctcaggtt

SEQ ID NO: 2308 - DNA, 20 bp, Artificial sequence
  Synthetic oligonucleotide
acccataactctacagtgca

SEQ ID NO: 2309 - DNA, 20 bp, Artificial sequence
  Synthetic oligonucleotide
gctggcttcctccctgcagt

SEQ ID NO: 2310 - DNA, 20 bp, Artificial sequence
  Synthetic oligonucleotide
cccaaattttacattcaagc

SEQ ID NO: 2311 - DNA, 20 bp, Artificial sequence
  Synthetic oligonucleotide
ccttctacttaattttcctc

SEQ ID NO: 2312 - DNA, 20 bp, Artificial sequence
  Synthetic oligonucleotide
tctcacaaacctactgagac

SEQ ID NO: 2313 - DNA, 20 bp, Artificial sequence
  Synthetic oligonucleotide
ttttagatacaccactataa

SEQ ID NO: 2314 - DNA, 20 bp, Artificial sequence
  Synthetic oligonucleotide
aatgggctacattaagctat

SEQ ID NO: 2315 - DNA, 20 bp, Artificial sequence
  Synthetic oligonucleotide
gtggctcatatcaatatgca

SEQ ID NO: 2316 - DNA, 20 bp, Artificial sequence
  Synthetic oligonucleotide
tctaataatatcctttgccc

SEQ ID NO: 2317 - DNA, 20 bp, Artificial sequence
  Synthetic oligonucleotide
aaatgtcttcccatattttg

SEQ ID NO: 2318 - DNA, 20 bp, Artificial sequence
  Synthetic oligonucleotide
tgctcaaccacatagaacat

SEQ ID NO: 2319 - DNA, 20 bp, Artificial sequence
  Synthetic oligonucleotide
tggccaagaatcacaggctt

SEQ ID NO: 2320 - DNA, 20 bp, Artificial sequence
  Synthetic oligonucleotide
ttcagcacttttacaccata

SEQ ID NO: 2321 - DNA, 20 bp, Artificial sequence
  Synthetic oligonucleotide
cctttcacattcattttcac

SEQ ID NO: 2322 - DNA, 20 bp, Artificial sequence
  Synthetic oligonucleotide
gggctatctttatctattgt

SEQ ID NO: 2323 - DNA, 20 bp, Artificial sequence
  Synthetic oligonucleotide
attaggttacattaagtggc

SEQ ID NO: 2324 - DNA, 20 bp, Artificial sequence
  Synthetic oligonucleotide
tataatcccatttaagaaca

SEQ ID NO: 2325 - DNA, 20 bp, Artificial sequence
  Synthetic oligonucleotide
gttcaagcccagaactctaa

SEQ ID NO: 2326 - DNA, 20 bp, Artificial sequence
  Synthetic oligonucleotide
tgggccactacactcagctc

SEQ ID NO: 2327 - DNA, 20 bp, Artificial sequence
  Synthetic oligonucleotide
actgtattttttatgatctt

SEQ ID NO: 2328 - DNA, 20 bp, Artificial sequence
  Synthetic oligonucleotide
taactgctttcaatttttga

SEQ ID NO: 2329 - DNA, 20 bp, Artificial sequence
  Synthetic oligonucleotide
tgccttatttcttcattgcc

SEQ ID NO: 2330 - DNA, 20 bp, Artificial sequence
  Synthetic oligonucleotide
gagttcttagaaaaagatca

SEQ ID NO: 2331 - DNA, 20 bp, Artificial sequence
  Synthetic oligonucleotide
aggtaaattcctttttggaa

SEQ ID NO: 2332 - DNA, 20 bp, Artificial sequence
  Synthetic oligonucleotide
cttacacttcccttctccct

SEQ ID NO: 2333 - DNA, 20 bp, Artificial sequence
  Synthetic oligonucleotide
cccataactctacagtgcaa

SEQ ID NO: 2334 - DNA, 20 bp, Artificial sequence
  Synthetic oligonucleotide
ttatccaattatccatccca

SEQ ID NO: 2335 - DNA, 20 bp, Artificial sequence
  Synthetic oligonucleotide
gaggcatctgcataactgac

SEQ ID NO: 2336 - DNA, 20 bp, Artificial sequence
  Synthetic oligonucleotide
tttagatacaccactataac

SEQ ID NO: 2337 - DNA, 20 bp, Artificial sequence
  Synthetic oligonucleotide
aggatgctcaaccctgggct

SEQ ID NO: 2338 - DNA, 20 bp, Artificial sequence
  Synthetic oligonucleotide
agtgctttcatttaatatgc

SEQ ID NO: 2339 - DNA, 20 bp, Artificial sequence
  Synthetic oligonucleotide
cttaatataatttcaaccca

SEQ ID NO: 2340 - DNA, 20 bp, Artificial sequence
  Synthetic oligonucleotide
gcctaattcattagctgatt

SEQ ID NO: 2341 - DNA, 20 bp, Artificial sequence
  Synthetic oligonucleotide
tgtcagacaattaaaaaggg

SEQ ID NO: 2342 - DNA, 20 bp, Artificial sequence
  Synthetic oligonucleotide
gcctgtaatttcatttttaa

SEQ ID NO: 2343 - DNA, 20 bp, Artificial sequence
  Synthetic oligonucleotide
acatcttaatttccttatgc

SEQ ID NO: 2344 - DNA, 20 bp, Artificial sequence
  Synthetic oligonucleotide
agttaacaatatatttacaa

SEQ ID NO: 2345 - DNA, 20 bp, Artificial sequence
  Synthetic oligonucleotide
accaccattaacaacaacac

SEQ ID NO: 2346 - DNA, 20 bp, Artificial sequence
  Synthetic oligonucleotide
tagagacctaacaatttcac

SEQ ID NO: 2347 - DNA, 20 bp, Artificial sequence
  Synthetic oligonucleotide
aggacgaccatcatctggga

SEQ ID NO: 2348 - DNA, 20 bp, Artificial sequence
  Synthetic oligonucleotide
tgtggtgacatcatcacaaa

SEQ ID NO: 2349 - DNA, 20 bp, Artificial sequence
  Synthetic oligonucleotide
atcacaggctttaaacggta

SEQ ID NO: 2350 - DNA, 20 bp, Artificial sequence
  Synthetic oligonucleotide
ttaggttacattaagtggca

SEQ ID NO: 2351 - DNA, 20 bp, Artificial sequence
  Synthetic oligonucleotide
tgcaccttcctcaaatccag

SEQ ID NO: 2352 - DNA, 20 bp, Artificial sequence
  Synthetic oligonucleotide
attttccaatcaatataaac

SEQ ID NO: 2353 - DNA, 20 bp, Artificial sequence
  Synthetic oligonucleotide
tcagcacttttacaccatac

SEQ ID NO: 2354 - DNA, 20 bp, Artificial sequence
  Synthetic oligonucleotide
tcacattgaattctatgtta

SEQ ID NO: 2355 - DNA, 20 bp, Artificial sequence
  Synthetic oligonucleotide
ctttgatgcactctagcact

SEQ ID NO: 2356 - DNA, 20 bp, Artificial sequence
  Synthetic oligonucleotide
aatgtcttcccatattttgg

SEQ ID NO: 2357 - DNA, 20 bp, Artificial sequence
  Synthetic oligonucleotide
tctggatcttatcttcctta

SEQ ID NO: 2358 - DNA, 20 bp, Artificial sequence
  Synthetic oligonucleotide
cttgcaagcattatttaatt

SEQ ID NO: 2359 - DNA, 20 bp, Artificial sequence
  Synthetic oligonucleotide
aaaactaacatctaatagtt

SEQ ID NO: 2360 - DNA, 20 bp, Artificial sequence
  Synthetic oligonucleotide
ctcagcacatctacttgggc

SEQ ID NO: 2361 - DNA, 20 bp, Artificial sequence
  Synthetic oligonucleotide
tagaactttcttaactgaga

SEQ ID NO: 2362 - DNA, 20 bp, Artificial sequence
  Synthetic oligonucleotide
ttttgggcaattttttccta

SEQ ID NO: 2363 - DNA, 20 bp, Artificial sequence
  Synthetic oligonucleotide
cttctacttaattttcctct

SEQ ID NO: 2364 - DNA, 20 bp, Artificial sequence
  Synthetic oligonucleotide
atctttcatataaattctta

SEQ ID NO: 2365 - DNA, 20 bp, Artificial sequence
  Synthetic oligonucleotide
gccaccagaattcccagact

SEQ ID NO: 2366 - DNA, 20 bp, Artificial sequence
  Synthetic oligonucleotide
cactacaaaattacctctca

SEQ ID NO: 2367 - DNA, 20 bp, Artificial sequence
  Synthetic oligonucleotide
ggctatctttatctattgta

SEQ ID NO: 2368 - DNA, 20 bp, Artificial sequence
  Synthetic oligonucleotide
cctttgcccctttcttcctc

SEQ ID NO: 2369 - DNA, 20 bp, Artificial sequence
  Synthetic oligonucleotide
gctcaaccacatagaacata

SEQ ID NO: 2370 - DNA, 20 bp, Artificial sequence
  Synthetic oligonucleotide
ttccttttaaaccttataaa

SEQ ID NO: 2371 - DNA, 20 bp, Artificial sequence
  Synthetic oligonucleotide
gagtttataaattttatgtc

SEQ ID NO: 2372 - DNA, 20 bp, Artificial sequence
  Synthetic oligonucleotide
gtcattacaaaatatttgaa

SEQ ID NO: 2373 - DNA, 20 bp, Artificial sequence
  Synthetic oligonucleotide
cccattctacttattcagct

SEQ ID NO: 2374 - DNA, 20 bp, Artificial sequence
  Synthetic oligonucleotide
ttcacattcattttcacgac

SEQ ID NO: 2375 - DNA, 20 bp, Artificial sequence
  Synthetic oligonucleotide
tgcagctgttttctagggta

SEQ ID NO: 2376 - DNA, 20 bp, Artificial sequence
  Synthetic oligonucleotide
tggctcatatcaatatgcaa

SEQ ID NO: 2377 - DNA, 20 bp, Artificial sequence
  Synthetic oligonucleotide
ggagagaacctttttgggtt

SEQ ID NO: 2378 - DNA, 20 bp, Artificial sequence
  Synthetic oligonucleotide
ttctcgataatttttctcta

SEQ ID NO: 2379 - DNA, 20 bp, Artificial sequence
  Synthetic oligonucleotide
acttagattactgcctggca

SEQ ID NO: 2380 - DNA, 20 bp, Artificial sequence
  Synthetic oligonucleotide
atgcttacttctacacctga

SEQ ID NO: 2381 - DNA, 20 bp, Artificial sequence
  Synthetic oligonucleotide
ctcacaaacctactgagaca

SEQ ID NO: 2382 - DNA, 20 bp, Artificial sequence
  Synthetic oligonucleotide
ggaggtagttcattttcaac

SEQ ID NO: 2383 - DNA, 20 bp, Artificial sequence
  Synthetic oligonucleotide
attcacctttacattttcaa

SEQ ID NO: 2384 - DNA, 20 bp, Artificial sequence
  Synthetic oligonucleotide
aatgtatatctttctttcca

SEQ ID NO: 2385 - DNA, 20 bp, Artificial sequence
  Synthetic oligonucleotide
cagtctttttacctcagcat

SEQ ID NO: 2386 - DNA, 20 bp, Artificial sequence
  Synthetic oligonucleotide
tggcatgaaatatattcaat

SEQ ID NO: 2387 - DNA, 20 bp, Artificial sequence
  Synthetic oligonucleotide
ataagagtttctatagtaac

SEQ ID NO: 2388 - DNA, 20 bp, Artificial sequence
  Synthetic oligonucleotide
cctatttccaaaacaaccac

SEQ ID NO: 2389 - DNA, 20 bp, Artificial sequence
  Synthetic oligonucleotide
cactctagaattcttaactt

SEQ ID NO: 2390 - DNA, 20 bp, Artificial sequence
  Synthetic oligonucleotide
caacacatatatatccagaa

SEQ ID NO: 2391 - DNA, 20 bp, Artificial sequence
  Synthetic oligonucleotide
ccataagaaccaatttttgt

SEQ ID NO: 2392 - DNA, 20 bp, Artificial sequence
  Synthetic oligonucleotide
agggcagaatttatatcgct

SEQ ID NO: 2393 - DNA, 20 bp, Artificial sequence
  Synthetic oligonucleotide
ccctcacacacctggatcac

SEQ ID NO: 2394 - DNA, 20 bp, Artificial sequence
  Synthetic oligonucleotide
gtgaccctattatttattca

SEQ ID NO: 2395 - DNA, 20 bp, Artificial sequence
  Synthetic oligonucleotide
ggaacattcttcttcctctt

SEQ ID NO: 2396 - DNA, 20 bp, Artificial sequence
  Synthetic oligonucleotide
cctagtctttaatatccggc

SEQ ID NO: 2397 - DNA, 20 bp, Artificial sequence
  Synthetic oligonucleotide
ccaaattttacattcaagct

SEQ ID NO: 2398 - DNA, 20 bp, Artificial sequence
  Synthetic oligonucleotide
ttagtttgaattccttttcc

SEQ ID NO: 2399 - DNA, 20 bp, Artificial sequence
  Synthetic oligonucleotide
tctcagatcttaaaatacaa

SEQ ID NO: 2400 - DNA, 20 bp, Artificial sequence
  Synthetic oligonucleotide
ccacaaacaccctcaggttc

SEQ ID NO: 2401 - DNA, 20 bp, Artificial sequence
  Synthetic oligonucleotide
cataagaaccaatttttgtc

SEQ ID NO: 2402 - DNA, 20 bp, Artificial sequence
  Synthetic oligonucleotide
agcccagaactctaatagcc

SEQ ID NO: 2403 - DNA, 20 bp, Artificial sequence
  Synthetic oligonucleotide
agaactttcttaactgagac

SEQ ID NO: 2404 - DNA, 20 bp, Artificial sequence
  Synthetic oligonucleotide
agagtttttccagataacta

SEQ ID NO: 2405 - DNA, 20 bp, Artificial sequence
  Synthetic oligonucleotide
aatttcatttttaaatagtt

SEQ ID NO: 2406 - DNA, 20 bp, Artificial sequence
  Synthetic oligonucleotide
ctagtctttaatatccggct

SEQ ID NO: 2407 - DNA, 20 bp, Artificial sequence
  Synthetic oligonucleotide
ttcacctttacattttcaat

SEQ ID NO: 2408 - DNA, 20 bp, Artificial sequence
  Synthetic oligonucleotide
cagcacttttacaccataca

SEQ ID NO: 2409 - DNA, 20 bp, Artificial sequence
  Synthetic oligonucleotide
tcctaagtcacaccgcccct

SEQ ID NO: 2410 - DNA, 20 bp, Artificial sequence
  Synthetic oligonucleotide
tcattacaaaatatttgaac

SEQ ID NO: 2411 - DNA, 20 bp, Artificial sequence
  Synthetic oligonucleotide
tccttttaaaccttataaac

SEQ ID NO: 2412 - DNA, 20 bp, Artificial sequence
  Synthetic oligonucleotide
tttccaatcaatataaacta

SEQ ID NO: 2413 - DNA, 20 bp, Artificial sequence
  Synthetic oligonucleotide
atttgggaatcattgagctt

SEQ ID NO: 2414 - DNA, 20 bp, Artificial sequence
  Synthetic oligonucleotide
gataatttttctctcagcat

SEQ ID NO: 2415 - DNA, 20 bp, Artificial sequence
  Synthetic oligonucleotide
ttcatataaattcttagatt

SEQ ID NO: 2416 - DNA, 20 bp, Artificial sequence
  Synthetic oligonucleotide
gggaaataacacatgcaact

SEQ ID NO: 2417 - DNA, 20 bp, Artificial sequence
  Synthetic oligonucleotide
tcgataatttttctctagaa

SEQ ID NO: 2418 - DNA, 20 bp, Artificial sequence
  Synthetic oligonucleotide
gggccactacactcagctcc

SEQ ID NO: 2419 - DNA, 20 bp, Artificial sequence
  Synthetic oligonucleotide
acattcttcttcctcttgca

SEQ ID NO: 2420 - DNA, 20 bp, Artificial sequence
  Synthetic oligonucleotide
gtttagatttcattcattca

SEQ ID NO: 2421 - DNA, 20 bp, Artificial sequence
  Synthetic oligonucleotide
aagagtttctatagtaacaa

SEQ ID NO: 2422 - DNA, 20 bp, Artificial sequence
  Synthetic oligonucleotide
ccaccattaacaacaacaca

SEQ ID NO: 2423 - DNA, 20 bp, Artificial sequence
  Synthetic oligonucleotide
gcaccttcctcaaatccaga

SEQ ID NO: 2424 - DNA, 20 bp, Artificial sequence
  Synthetic oligonucleotide
ggtatggttttaatttggga

SEQ ID NO: 2425 - DNA, 20 bp, Artificial sequence
  Synthetic oligonucleotide
ccataactctacagtgcaaa

SEQ ID NO: 2426 - DNA, 20 bp, Artificial sequence
  Synthetic oligonucleotide
ttagatacaccactataacc

SEQ ID NO: 2427 - DNA, 20 bp, Artificial sequence
  Synthetic oligonucleotide
tctatgttaaatcagtgacc

SEQ ID NO: 2428 - DNA, 20 bp, Artificial sequence
  Synthetic oligonucleotide
cacattcattttcacgacca

SEQ ID NO: 2429 - DNA, 20 bp, Artificial sequence
  Synthetic oligonucleotide
gtgctttcatttaatatgct

SEQ ID NO: 2430 - DNA, 20 bp, Artificial sequence
  Synthetic oligonucleotide
ggcatgaaatatattcaata

SEQ ID NO: 2431 - DNA, 20 bp, Artificial sequence
  Synthetic oligonucleotide
ttgcaagcattatttaattt

SEQ ID NO: 2432 - DNA, 20 bp, Artificial sequence
  Synthetic oligonucleotide
aaactaacatctaatagttg

SEQ ID NO: 2433 - DNA, 20 bp, Artificial sequence
  Synthetic oligonucleotide
ataatcccatttaagaacat

SEQ ID NO: 2434 - DNA, 20 bp, Artificial sequence
  Synthetic oligonucleotide
atccaattatccatcccagt

SEQ ID NO: 2435 - DNA, 20 bp, Artificial sequence
  Synthetic oligonucleotide
tagcaactttttcttacctt

SEQ ID NO: 2436 - DNA, 20 bp, Artificial sequence
  Synthetic oligonucleotide
tcagatcttaaaatacaaca

SEQ ID NO: 2437 - DNA, 20 bp, Artificial sequence
  Synthetic oligonucleotide
taaggacaatcattactatc

SEQ ID NO: 2438 - DNA, 20 bp, Artificial sequence
  Synthetic oligonucleotide
ttacacttcccttctccctc

SEQ ID NO: 2439 - DNA, 20 bp, Artificial sequence
  Synthetic oligonucleotide
acacctggatcaccctgcgc

SEQ ID NO: 2440 - DNA, 20 bp, Artificial sequence
  Synthetic oligonucleotide
agtttataaattttatgtct

SEQ ID NO: 2441 - DNA, 20 bp, Artificial sequence
  Synthetic oligonucleotide
ggtaaattcctttttggaaa

SEQ ID NO: 2442 - DNA, 20 bp, Artificial sequence
  Synthetic oligonucleotide
gtggtgacatcatcacaaat

SEQ ID NO: 2443 - DNA, 20 bp, Artificial sequence
  Synthetic oligonucleotide
gccttatttcttcattgcct

SEQ ID NO: 2444 - DNA, 20 bp, Artificial sequence
  Synthetic oligonucleotide
gtcagacaattaaaaaggga

SEQ ID NO: 2445 - DNA, 20 bp, Artificial sequence
  Synthetic oligonucleotide
acacatatatatccagaaga

SEQ ID NO: 2446 - DNA, 20 bp, Artificial sequence
  Synthetic oligonucleotide
atataatttcaacccaacct

SEQ ID NO: 2447 - DNA, 20 bp, Artificial sequence
  Synthetic oligonucleotide
gttaacaatatatttacaaa

SEQ ID NO: 2448 - DNA, 20 bp, Artificial sequence
  Synthetic oligonucleotide
ctataaattatatcttgcca

SEQ ID NO: 2449 - DNA, 20 bp, Artificial sequence
  Synthetic oligonucleotide
gaaggtatttcacagatgta

SEQ ID NO: 2450 - DNA, 20 bp, Artificial sequence
  Synthetic oligonucleotide
gggcagaatttatatcgctt

SEQ ID NO: 2451 - DNA, 20 bp, Artificial sequence
  Synthetic oligonucleotide
gattagtttcttctactgta

SEQ ID NO: 2452 - DNA, 20 bp, Artificial sequence
  Synthetic oligonucleotide
tacaaaattacctctcactc

SEQ ID NO: 2453 - DNA, 20 bp, Artificial sequence
  Synthetic oligonucleotide
tttgggcaattttttcctaa

SEQ ID NO: 2454 - DNA, 20 bp, Artificial sequence
  Synthetic oligonucleotide
ctagaattcttaacttggtt

SEQ ID NO: 2455 - DNA, 20 bp, Artificial sequence
  Synthetic oligonucleotide
ggcatctgcataactgactc

SEQ ID NO: 2456 - DNA, 20 bp, Artificial sequence
  Synthetic oligonucleotide
ttctacttaattttcctctt

SEQ ID NO: 2457 - DNA, 20 bp, Artificial sequence
  Synthetic oligonucleotide
caaattttacattcaagctt

SEQ ID NO: 2458 - DNA, 20 bp, Artificial sequence
  Synthetic oligonucleotide
agagacctaacaatttcact

SEQ ID NO: 2459 - DNA, 20 bp, Artificial sequence
  Synthetic oligonucleotide
atgtcttcccatattttgga

SEQ ID NO: 2460 - DNA, 20 bp, Artificial sequence
  Synthetic oligonucleotide
cagctcttccatgatgaata

SEQ ID NO: 2461 - DNA, 20 bp, Artificial sequence
  Synthetic oligonucleotide
agatgccattttaaagacga

SEQ ID NO: 2462 - DNA, 20 bp, Artificial sequence
  Synthetic oligonucleotide
atctttatctattgtagcta

SEQ ID NO: 2463 - DNA, 20 bp, Artificial sequence
  Synthetic oligonucleotide
gtttgaattccttttccagc

SEQ ID NO: 2464 - DNA, 20 bp, Artificial sequence
  Synthetic oligonucleotide
cactctagcactcttagtta

SEQ ID NO: 2465 - DNA, 20 bp, Artificial sequence
  Synthetic oligonucleotide
gcagctgttttctagggtaa

SEQ ID NO: 2466 - DNA, 20 bp, Artificial sequence
  Synthetic oligonucleotide
tcagcacatctacttgggct

SEQ ID NO: 2467 - DNA, 20 bp, Artificial sequence
  Synthetic oligonucleotide
gatcttatcttccttattga

SEQ ID NO: 2468 - DNA, 20 bp, Artificial sequence
  Synthetic oligonucleotide
ccattctacttattcagctt

SEQ ID NO: 2469 - DNA, 20 bp, Artificial sequence
  Synthetic oligonucleotide
gcccctttcttcctctctta

SEQ ID NO: 2470 - DNA, 20 bp, Artificial sequence
  Synthetic oligonucleotide
tgaccctattatttattcac

SEQ ID NO: 2471 - DNA, 20 bp, Artificial sequence
  Synthetic oligonucleotide
ccaccagaattcccagactt

SEQ ID NO: 2472 - DNA, 20 bp, Artificial sequence
  Synthetic oligonucleotide
ttagttagaatttccaggaa

SEQ ID NO: 2473 - DNA, 20 bp, Artificial sequence
  Synthetic oligonucleotide
tgtatatctttctttccatc

SEQ ID NO: 2474 - DNA, 20 bp, Artificial sequence
  Synthetic oligonucleotide
actgctttcaatttttgaac

SEQ ID NO: 2475 - DNA, 20 bp, Artificial sequence
  Synthetic oligonucleotide
catcttaatttccttatgct

SEQ ID NO: 2476 - DNA, 20 bp, Artificial sequence
  Synthetic oligonucleotide
ctatttccaaaacaaccacc

SEQ ID NO: 2477 - DNA, 20 bp, Artificial sequence
  Synthetic oligonucleotide
acatagttctttccaacttt

SEQ ID NO: 2478 - DNA, 20 bp, Artificial sequence
  Synthetic oligonucleotide
cacctggatcaccctgcgca

SEQ ID NO: 2479 - DNA, 20 bp, Artificial sequence
  Synthetic oligonucleotide
ataagaaccaatttttgtcc

SEQ ID NO: 2480 - DNA, 20 bp, Artificial sequence
  Synthetic oligonucleotide
aagatgttttttctttccct

SEQ ID NO: 2481 - DNA, 20 bp, Artificial sequence
  Synthetic oligonucleotide
tggtgacatcatcacaaata

SEQ ID NO: 2482 - DNA, 20 bp, Artificial sequence
  Synthetic oligonucleotide
gtaaagcttaaaccatccaa

SEQ ID NO: 2483 - DNA, 20 bp, Artificial sequence
  Synthetic oligonucleotide
agcacttttacaccatacaa

SEQ ID NO: 2484 - DNA, 20 bp, Artificial sequence
  Synthetic oligonucleotide
ttggttctcatccatttgtt

SEQ ID NO: 2485 - DNA, 20 bp, Artificial sequence
  Synthetic oligonucleotide
atagttctttccaactttct

SEQ ID NO: 2486 - DNA, 20 bp, Artificial sequence
  Synthetic oligonucleotide
cacctttacattttcaattt

SEQ ID NO: 2487 - DNA, 20 bp, Artificial sequence
  Synthetic oligonucleotide
gtatatctttctttccatct

SEQ ID NO: 2488 - DNA, 20 bp, Artificial sequence
  Synthetic oligonucleotide
ttccaatcaatataaactac

SEQ ID NO: 2489 - DNA, 20 bp, Artificial sequence
  Synthetic oligonucleotide
attctacttattcagctttc

SEQ ID NO: 2490 - DNA, 20 bp, Artificial sequence
  Synthetic oligonucleotide
atcttaatttccttatgctt

SEQ ID NO: 2491 - DNA, 20 bp, Artificial sequence
  Synthetic oligonucleotide
tagtctttaatatccggctc

SEQ ID NO: 2492 - DNA, 20 bp, Artificial sequence
  Synthetic oligonucleotide
cttatttcttcattgcctgc

SEQ ID NO: 2493 - DNA, 20 bp, Artificial sequence
  Synthetic oligonucleotide
cgataatttttctctagaaa

SEQ ID NO: 2494 - DNA, 20 bp, Artificial sequence
  Synthetic oligonucleotide
ccattaacaacaacacagac

SEQ ID NO: 2495 - DNA, 20 bp, Artificial sequence
  Synthetic oligonucleotide
cagcacatctacttgggctc

SEQ ID NO: 2496 - DNA, 20 bp, Artificial sequence
  Synthetic oligonucleotide
ccatgatgaataccttttaa

SEQ ID NO: 2497 - DNA, 20 bp, Artificial sequence
  Synthetic oligonucleotide
accttcctcaaatccagagc

SEQ ID NO: 2498 - DNA, 20 bp, Artificial sequence
  Synthetic oligonucleotide
tcagacaattaaaaagggaa

SEQ ID NO: 2499 - DNA, 20 bp, Artificial sequence
  Synthetic oligonucleotide
tctgtatctctctccagact

SEQ ID NO: 2500 - DNA, 20 bp, Artificial sequence
  Synthetic oligonucleotide
gatgccattttaaagacgat

SEQ ID NO: 2501 - DNA, 20 bp, Artificial sequence
  Synthetic oligonucleotide
gtctttttacctcagcattt

SEQ ID NO: 2502 - DNA, 20 bp, Artificial sequence
  Synthetic oligonucleotide
tacacttcccttctccctca

SEQ ID NO: 2503 - DNA, 20 bp, Artificial sequence
  Synthetic oligonucleotide
aaggtcccaaatcagttgaa

SEQ ID NO: 2504 - DNA, 20 bp, Artificial sequence
  Synthetic oligonucleotide
cagatcttaaaatacaacaa

SEQ ID NO: 2505 - DNA, 20 bp, Artificial sequence
  Synthetic oligonucleotide
gaggaaagacacactgggta

SEQ ID NO: 2506 - DNA, 20 bp, Artificial sequence
  Synthetic oligonucleotide
tttagattttttccacctgc

SEQ ID NO: 2507 - DNA, 20 bp, Artificial sequence
  Synthetic oligonucleotide
gtcttcccatattttggaca

SEQ ID NO: 2508 - DNA, 20 bp, Artificial sequence
  Synthetic oligonucleotide
cctttcttcctctcttatta

SEQ ID NO: 2509 - DNA, 20 bp, Artificial sequence
  Synthetic oligonucleotide
tgcaagcattatttaatttc

SEQ ID NO: 2510 - DNA, 20 bp, Artificial sequence
  Synthetic oligonucleotide
ccagaattcccagacttcct

SEQ ID NO: 2511 - DNA, 20 bp, Artificial sequence
  Synthetic oligonucleotide
tatttccaaaacaaccacca

SEQ ID NO: 2512 - DNA, 20 bp, Artificial sequence
  Synthetic oligonucleotide
tagatacaccactataacca

SEQ ID NO: 2513 - DNA, 20 bp, Artificial sequence
  Synthetic oligonucleotide
tggaggaccaatctgagctt

SEQ ID NO: 2514 - DNA, 20 bp, Artificial sequence
  Synthetic oligonucleotide
tttagatttcattcattcaa

SEQ ID NO: 2515 - DNA, 20 bp, Artificial sequence
  Synthetic oligonucleotide
ataacacatgcaactagtta

SEQ ID NO: 2516 - DNA, 20 bp, Artificial sequence
  Synthetic oligonucleotide
gaccctattatttattcact

SEQ ID NO: 2517 - DNA, 20 bp, Artificial sequence
  Synthetic oligonucleotide
aaggacaatcattactatct

SEQ ID NO: 2518 - DNA, 20 bp, Artificial sequence
  Synthetic oligonucleotide
gcctgaacttttaagtagaa

SEQ ID NO: 2519 - DNA, 20 bp, Artificial sequence
  Synthetic oligonucleotide
cagcacgcaccaccacatcc

SEQ ID NO: 2520 - DNA, 20 bp, Artificial sequence
  Synthetic oligonucleotide
tcatataaattcttagatta

SEQ ID NO: 2521 - DNA, 20 bp, Artificial sequence
  Synthetic oligonucleotide
caattgagaaattattggct

SEQ ID NO: 2522 - DNA, 20 bp, Artificial sequence
  Synthetic oligonucleotide
gtttctatagtaacaattat

SEQ ID NO: 2523 - DNA, 20 bp, Artificial sequence
  Synthetic oligonucleotide
gtatggttttaatttgggaa

SEQ ID NO: 2524 - DNA, 20 bp, Artificial sequence
  Synthetic oligonucleotide
gggcaattttttcctaatcc

SEQ ID NO: 2525 - DNA, 20 bp, Artificial sequence
  Synthetic oligonucleotide
gtctacttaaaaaaaatctg

SEQ ID NO: 2526 - DNA, 20 bp, Artificial sequence
  Synthetic oligonucleotide
tagttagaatttccaggaat

SEQ ID NO: 2527 - DNA, 20 bp, Artificial sequence
  Synthetic oligonucleotide
tataatttcaacccaacctc

SEQ ID NO: 2528 - DNA, 20 bp, Artificial sequence
  Synthetic oligonucleotide
acaaaattacctctcactct

SEQ ID NO: 2529 - DNA, 20 bp, Artificial sequence
  Synthetic oligonucleotide
tcccatttaagaacatagtt

SEQ ID NO: 2530 - DNA, 20 bp, Artificial sequence
  Synthetic oligonucleotide
gacctaacaatttcactggt

SEQ ID NO: 2531 - DNA, 20 bp, Artificial sequence
  Synthetic oligonucleotide
tccaattatccatcccagtt

SEQ ID NO: 2532 - DNA, 20 bp, Artificial sequence
  Synthetic oligonucleotide
actctagcactcttagttaa

SEQ ID NO: 2533 - DNA, 20 bp, Artificial sequence
  Synthetic oligonucleotide
ctgctttcaatttttgaacc

SEQ ID NO: 2534 - DNA, 20 bp, Artificial sequence
  Synthetic oligonucleotide
cattcaagctttatttaccc

SEQ ID NO: 2535 - DNA, 20 bp, Artificial sequence
  Synthetic oligonucleotide
tacttaattttcctcttctc

SEQ ID NO: 2536 - DNA, 20 bp, Artificial sequence
  Synthetic oligonucleotide
aacaatatatttacaaagtg

SEQ ID NO: 2537 - DNA, 20 bp, Artificial sequence
  Synthetic oligonucleotide
ttagtttcttctactgtagc

SEQ ID NO: 2538 - DNA, 20 bp, Artificial sequence
  Synthetic oligonucleotide
gctaacctaattttaaatta

SEQ ID NO: 2539 - DNA, 20 bp, Artificial sequence
  Synthetic oligonucleotide
ggccactacactcagctcct

SEQ ID NO: 2540 - DNA, 20 bp, Artificial sequence
  Synthetic oligonucleotide
catatgttcccaactccata

SEQ ID NO: 2541 - DNA, 20 bp, Artificial sequence
  Synthetic oligonucleotide
tctggaataaatattttcaa

SEQ ID NO: 2542 - DNA, 20 bp, Artificial sequence
  Synthetic oligonucleotide
taactgactccctttactct

SEQ ID NO: 2543 - DNA, 20 bp, Artificial sequence
  Synthetic oligonucleotide
ccttttaaaccttataaaca

SEQ ID NO: 2544 - DNA, 20 bp, Artificial sequence
  Synthetic oligonucleotide
gtaagctactttccagaaaa

SEQ ID NO: 2545 - DNA, 20 bp, Artificial sequence
  Synthetic oligonucleotide
gaactttcttaactgagaca

SEQ ID NO: 2546 - DNA, 20 bp, Artificial sequence
  Synthetic oligonucleotide
tgctttcatttaatatgcta

SEQ ID NO: 2547 - DNA, 20 bp, Artificial sequence
  Synthetic oligonucleotide
tttgaattccttttccagca

SEQ ID NO: 2548 - DNA, 20 bp, Artificial sequence
  Synthetic oligonucleotide
gcccagaactctaatagcct

SEQ ID NO: 2549 - DNA, 20 bp, Artificial sequence
  Synthetic oligonucleotide
aatcagtgaccatatcacca

SEQ ID NO: 2550 - DNA, 20 bp, Artificial sequence
  Synthetic oligonucleotide
cattcttcttcctcttgcac

SEQ ID NO: 2551 - DNA, 20 bp, Artificial sequence
  Synthetic oligonucleotide
acagtgcaaaacatgaaaaa

SEQ ID NO: 2552 - DNA, 20 bp, Artificial sequence
  Synthetic oligonucleotide
ggcagaatttatatcgcttc

SEQ ID NO: 2553 - DNA, 20 bp, Artificial sequence
  Synthetic oligonucleotide
acattcattttcacgaccaa

SEQ ID NO: 2554 - DNA, 20 bp, Artificial sequence
  Synthetic oligonucleotide
atcttatcttccttattgaa

SEQ ID NO: 2555 - DNA, 20 bp, Artificial sequence
  Synthetic oligonucleotide
gcatttataattttggttgc

SEQ ID NO: 2556 - DNA, 20 bp, Artificial sequence
  Synthetic oligonucleotide
ttttctttttctgctcttat

SEQ ID NO: 2557 - DNA, 20 bp, Artificial sequence
  Synthetic oligonucleotide
acgcaatttaatttcttcat

SEQ ID NO: 2558 - DNA, 20 bp, Artificial sequence
  Synthetic oligonucleotide
tggttttgttttctcacata

SEQ ID NO: 2559 - DNA, 20 bp, Artificial sequence
  Synthetic oligonucleotide
tgcttttattcagcttttca

SEQ ID NO: 2560 - DNA, 20 bp, Artificial sequence
  Synthetic oligonucleotide
ccttatttcttcattgcctg

SEQ ID NO: 2561 - DNA, 20 bp, Artificial sequence
  Synthetic oligonucleotide
gttgtttttcatcatgtttt

SEQ ID NO: 2562 - DNA, 20 bp, Artificial sequence
  Synthetic oligonucleotide
ctgcttttattcagcttttc

SEQ ID NO: 2563 - DNA, 20 bp, Artificial sequence
  Synthetic oligonucleotide
tttgcatatgtataatccca

SEQ ID NO: 2564 - DNA, 20 bp, Artificial sequence
  Synthetic oligonucleotide
gctttcaatttttgaaccac

SEQ ID NO: 2565 - DNA, 20 bp, Artificial sequence
  Synthetic oligonucleotide
tcactcatatcttagtacct

SEQ ID NO: 2566 - DNA, 20 bp, Artificial sequence
  Synthetic oligonucleotide
ttacattttcaatttctgca

SEQ ID NO: 2567 - DNA, 20 bp, Artificial sequence
  Synthetic oligonucleotide
cttgttttactttcgctttc

SEQ ID NO: 2568 - DNA, 20 bp, Artificial sequence
  Synthetic oligonucleotide
ctgacaattatgcttcagtc

SEQ ID NO: 2569 - DNA, 20 bp, Artificial sequence
  Synthetic oligonucleotide
gttctaatttttagttacaa

SEQ ID NO: 2570 - DNA, 20 bp, Artificial sequence
  Synthetic oligonucleotide
tcttgcatacactatcttct

SEQ ID NO: 2571 - DNA, 20 bp, Artificial sequence
  Synthetic oligonucleotide
aggcatttttgtcaagccta

SEQ ID NO: 2572 - DNA, 20 bp, Artificial sequence
  Synthetic oligonucleotide
tcacctttacattttcaatt

SEQ ID NO: 2573 - DNA, 20 bp, Artificial sequence
  Synthetic oligonucleotide
tttcacattcattttcacga

SEQ ID NO: 2574 - DNA, 20 bp, Artificial sequence
  Synthetic oligonucleotide
gctttaacttttagacaata

SEQ ID NO: 2575 - DNA, 20 bp, Artificial sequence
  Synthetic oligonucleotide
cctacaatatttcttttact

SEQ ID NO: 2576 - DNA, 20 bp, Artificial sequence
  Synthetic oligonucleotide
ccttaccttgtatttcagta

SEQ ID NO: 2577 - DNA, 20 bp, Artificial sequence
  Synthetic oligonucleotide
cctcattttttctgtttctt

SEQ ID NO: 2578 - DNA, 20 bp, Artificial sequence
  Synthetic oligonucleotide
ttgtagacttgttctaccac

SEQ ID NO: 2579 - DNA, 20 bp, Artificial sequence
  Synthetic oligonucleotide
ctgttacttctttgatgcac

SEQ ID NO: 2580 - DNA, 20 bp, Artificial sequence
  Synthetic oligonucleotide
tgctatttttagaattcttt

SEQ ID NO: 2581 - DNA, 20 bp, Artificial sequence
  Synthetic oligonucleotide
ttgagtatatcatcccatcc

SEQ ID NO: 2582 - DNA, 20 bp, Artificial sequence
  Synthetic oligonucleotide
atcctcctattcttgtcttc

SEQ ID NO: 2583 - DNA, 20 bp, Artificial sequence
  Synthetic oligonucleotide
gctctattattattggcaat

SEQ ID NO: 2584 - DNA, 20 bp, Artificial sequence
  Synthetic oligonucleotide
gttttgttttttttagcact

SEQ ID NO: 2585 - DNA, 20 bp, Artificial sequence
  Synthetic oligonucleotide
tctacttattcagctttctt

SEQ ID NO: 2586 - DNA, 20 bp, Artificial sequence
  Synthetic oligonucleotide
tctgtttcatacttggagtc

SEQ ID NO: 2587 - DNA, 20 bp, Artificial sequence
  Synthetic oligonucleotide
gttgccaagcatcctgcact

SEQ ID NO: 2588 - DNA, 20 bp, Artificial sequence
  Synthetic oligonucleotide
gtgatattagattcttcctt

SEQ ID NO: 2589 - DNA, 20 bp, Artificial sequence
  Synthetic oligonucleotide
acgcctaatttttttttctt

SEQ ID NO: 2590 - DNA, 20 bp, Artificial sequence
  Synthetic oligonucleotide
ctcaacatttttagggatca

SEQ ID NO: 2591 - DNA, 20 bp, Artificial sequence
  Synthetic oligonucleotide
tggttttgttttttttagca

SEQ ID NO: 2592 - DNA, 20 bp, Artificial sequence
  Synthetic oligonucleotide
ttgctatttttagaattctt

SEQ ID NO: 2593 - DNA, 20 bp, Artificial sequence
  Synthetic oligonucleotide
tcttttttttcttaagccag

SEQ ID NO: 2594 - DNA, 20 bp, Artificial sequence
  Synthetic oligonucleotide
tcacagtttagatttcattc

SEQ ID NO: 2595 - DNA, 20 bp, Artificial sequence
  Synthetic oligonucleotide
tcagtttgattagtttcttc

SEQ ID NO: 2596 - DNA, 20 bp, Artificial sequence
  Synthetic oligonucleotide
ctacaatttattgaatctct

SEQ ID NO: 2597 - DNA, 20 bp, Artificial sequence
  Synthetic oligonucleotide
tgtgcatatgttcccaactc

SEQ ID NO: 2598 - DNA, 20 bp, Artificial sequence
  Synthetic oligonucleotide
ccccaattttttgcttcaac

SEQ ID NO: 2599 - DNA, 20 bp, Artificial sequence
  Synthetic oligonucleotide
ctgcaaatatcacggcctct

SEQ ID NO: 2600 - DNA, 20 bp, Artificial sequence
  Synthetic oligonucleotide
ccctcattttttctgtttct

SEQ ID NO: 2601 - DNA, 20 bp, Artificial sequence
  Synthetic oligonucleotide
ttcttttttttcttaagcca

SEQ ID NO: 2602 - DNA, 20 bp, Artificial sequence
  Synthetic oligonucleotide
cttcatacttgatttgcatt

SEQ ID NO: 2603 - DNA, 20 bp, Artificial sequence
  Synthetic oligonucleotide
tcacattcattttcacgacc

SEQ ID NO: 2604 - DNA, 20 bp, Artificial sequence
  Synthetic oligonucleotide
gctggtttattttttttggc

SEQ ID NO: 2605 - DNA, 20 bp, Artificial sequence
  Synthetic oligonucleotide
tttgttttttttagcacttt

SEQ ID NO: 2606 - DNA, 20 bp, Artificial sequence
  Synthetic oligonucleotide
ttgtgcttatattttcaatt

SEQ ID NO: 2607 - DNA, 20 bp, Artificial sequence
  Synthetic oligonucleotide
cctattatttattcacttct

SEQ ID NO: 2608 - DNA, 20 bp, Artificial sequence
  Synthetic oligonucleotide
gctatacttgcctttgctct

SEQ ID NO: 2609 - DNA, 20 bp, Artificial sequence
  Synthetic oligonucleotide
tccaacacatatatatccag

SEQ ID NO: 2610 - DNA, 20 bp, Artificial sequence
  Synthetic oligonucleotide
tttccagtttcttctgactt

SEQ ID NO: 2611 - DNA, 20 bp, Artificial sequence
  Synthetic oligonucleotide
acttgatttgcattttttca

SEQ ID NO: 2612 - DNA, 20 bp, Artificial sequence
  Synthetic oligonucleotide
tcgctttcatcttcattaga

SEQ ID NO: 2613 - DNA, 20 bp, Artificial sequence
  Synthetic oligonucleotide
tggcctcaatttgatttcac

SEQ ID NO: 2614 - DNA, 20 bp, Artificial sequence
  Synthetic oligonucleotide
agcattatttaatttctctc

SEQ ID NO: 2615 - DNA, 20 bp, Artificial sequence
  Synthetic oligonucleotide
attcctatcttttgcctacc

SEQ ID NO: 2616 - DNA, 20 bp, Artificial sequence
  Synthetic oligonucleotide
caccaatgtatatctttctt

SEQ ID NO: 2617 - DNA, 20 bp, Artificial sequence
  Synthetic oligonucleotide
actgcttttattcagctttt

SEQ ID NO: 2618 - DNA, 20 bp, Artificial sequence
  Synthetic oligonucleotide
tttgcattttttcagagtat

SEQ ID NO: 2619 - DNA, 20 bp, Artificial sequence
  Synthetic oligonucleotide
gcattttttcagagtatcca

SEQ ID NO: 2620 - DNA, 20 bp, Artificial sequence
  Synthetic oligonucleotide
gtattttcatatttgttact

SEQ ID NO: 2621 - DNA, 20 bp, Artificial sequence
  Synthetic oligonucleotide
ttttgttttttttagcactt

SEQ ID NO: 2622 - DNA, 20 bp, Artificial sequence
  Synthetic oligonucleotide
cacttgttttactttcgctt

SEQ ID NO: 2623 - DNA, 20 bp, Artificial sequence
  Synthetic oligonucleotide
tctcttttatcagcttttta

SEQ ID NO: 2624 - DNA, 20 bp, Artificial sequence
  Synthetic oligonucleotide
gcttcatacttgatttgcat

SEQ ID NO: 2625 - DNA, 20 bp, Artificial sequence
  Synthetic oligonucleotide
tttcatatttgttacttcct

SEQ ID NO: 2626 - DNA, 20 bp, Artificial sequence
  Synthetic oligonucleotide
cctcaatttgatttcacatt

SEQ ID NO: 2627 - DNA, 20 bp, Artificial sequence
  Synthetic oligonucleotide
cgcttcatacttgatttgca

SEQ ID NO: 2628 - DNA, 20 bp, Artificial sequence
  Synthetic oligonucleotide
tgtccactctttttgcttcc

SEQ ID NO: 2629 - DNA, 20 bp, Artificial sequence
  Synthetic oligonucleotide
tggtttattttttttggctt

SEQ ID NO: 2630 - DNA, 20 bp, Artificial sequence
  Synthetic oligonucleotide
tttcatttaatatgctagct

SEQ ID NO: 2631 - DNA, 20 bp, Artificial sequence
  Synthetic oligonucleotide
actgacaattatgcttcagt

SEQ ID NO: 2632 - DNA, 20 bp, Artificial sequence
  Synthetic oligonucleotide
ttggctttttttttgagacc

SEQ ID NO: 2633 - DNA, 20 bp, Artificial sequence
  Synthetic oligonucleotide
gcctcaatttgatttcacat

SEQ ID NO: 2634 - DNA, 20 bp, Artificial sequence
  Synthetic oligonucleotide
ttgcattttttcagagtatc

SEQ ID NO: 2635 - DNA, 20 bp, Artificial sequence
  Synthetic oligonucleotide
agttgattttttttcctctt

SEQ ID NO: 2636 - DNA, 20 bp, Artificial sequence
  Synthetic oligonucleotide
ttcatatttgttacttcctt

SEQ ID NO: 2637 - DNA, 20 bp, Artificial sequence
  Synthetic oligonucleotide
gttcataccttatctctttc

SEQ ID NO: 2638 - DNA, 20 bp, Artificial sequence
  Synthetic oligonucleotide
tgtattttttatgatcttca

SEQ ID NO: 2639 - DNA, 20 bp, Artificial sequence
  Synthetic oligonucleotide
ttcctttaatgatgtcccat

SEQ ID NO: 2640 - DNA, 20 bp, Artificial sequence
  Synthetic oligonucleotide
gagccttactctttgtcccc

SEQ ID NO: 2641 - DNA, 20 bp, Artificial sequence
  Synthetic oligonucleotide
tttacattttttttccaaat

SEQ ID NO: 2642 - DNA, 20 bp, Artificial sequence
  Synthetic oligonucleotide
tggtgctgttttacattttt

SEQ ID NO: 2643 - DNA, 20 bp, Artificial sequence
  Synthetic oligonucleotide
gtgctgttttacattttttt

SEQ ID NO: 2644 - DNA, 20 bp, Artificial sequence
  Synthetic oligonucleotide
tgttttacattttttttcca

SEQ ID NO: 2645 - DNA, 20 bp, Artificial sequence
  Synthetic oligonucleotide
ttttacattttttttccaaa

SEQ ID NO: 2646 - DNA, 20 bp, Artificial sequence
  Synthetic oligonucleotide
gtggtgctgttttacatttt

SEQ ID NO: 2647 - DNA, 20 bp, Artificial sequence
  Synthetic oligonucleotide
tattttttttggcttttttt

SEQ ID NO: 2648 - DNA, 20 bp, Artificial sequence
  Synthetic oligonucleotide
caagctggtttatttttttt

SEQ ID NO: 2649 - DNA, 20 bp, Artificial sequence
  Synthetic oligonucleotide
aagctggtttattttttttg

SEQ ID NO: 2650 - DNA, 20 bp, Artificial sequence
  Synthetic oligonucleotide
ttattttttttggctttttt

SEQ ID NO: 2651 - DNA, 20 bp, Artificial sequence
  Synthetic oligonucleotide
tttattttttttggcttttt

SEQ ID NO: 2652 - DNA, 20 bp, Artificial sequence
  Synthetic oligonucleotide
gtttattttttttggctttt

SEQ ID NO: 2653 - DNA, 20 bp, Artificial sequence
  Synthetic oligonucleotide
ggtttattttttttggcttt

SEQ ID NO: 2654 - DNA, 20 bp, Artificial sequence
  Synthetic oligonucleotide
tattttcatatttgttactt

SEQ ID NO: 2655 - DNA, 20 bp, Artificial sequence
  Synthetic oligonucleotide
atatttgttacttcctttta

SEQ ID NO: 2656 - DNA, 20 bp, Artificial sequence
  Synthetic oligonucleotide
catatttgttacttcctttt

SEQ ID NO: 2657 - DNA, 20 bp, Artificial sequence
  Synthetic oligonucleotide
ttttcatatttgttacttcc

SEQ ID NO: 2658 - DNA, 20 bp, Artificial sequence
  Synthetic oligonucleotide
attttcatatttgttacttc

SEQ ID NO: 2659 - DNA, 20 bp, Artificial sequence
  Synthetic oligonucleotide
ccatttcttcagtgctttgt

SEQ ID NO: 2660 - DNA, 20 bp, Artificial sequence
  Synthetic oligonucleotide
ttccatttcttcagtgcttt

SEQ ID NO: 2661 - DNA, 20 bp, Artificial sequence
  Synthetic oligonucleotide
ctttccatttcttcagtgct

SEQ ID NO: 2662 - DNA, 20 bp, Artificial sequence
  Synthetic oligonucleotide
ctctttccatttcttcagtg

SEQ ID NO: 2663 - DNA, 20 bp, Artificial sequence
  Synthetic oligonucleotide
tccatttcttcagtgctttg

SEQ ID NO: 2664 - DNA, 20 bp, Artificial sequence
  Synthetic oligonucleotide
aagtgttttctttttctgct

SEQ ID NO: 2665 - DNA, 20 bp, Artificial sequence
  Synthetic oligonucleotide
tttctttttctgctcttata

SEQ ID NO: 2666 - DNA, 20 bp, Artificial sequence
  Synthetic oligonucleotide
ttctttttctgctcttatac

SEQ ID NO: 2667 - DNA, 20 bp, Artificial sequence
  Synthetic oligonucleotide
tctttttctgctcttatacg

SEQ ID NO: 2668 - DNA, 20 bp, Artificial sequence
  Synthetic oligonucleotide
ctttttctgctcttatacgc

SEQ ID NO: 2669 - DNA, 20 bp, Artificial sequence
  Synthetic oligonucleotide
tatccaattatccatcccag

SEQ ID NO: 2670 - DNA, 20 bp, Artificial sequence
  Synthetic oligonucleotide
tttatccaattatccatccc

SEQ ID NO: 2671 - DNA, 20 bp, Artificial sequence
  Synthetic oligonucleotide
catatgtataatcccattta

SEQ ID NO: 2672 - DNA, 20 bp, Artificial sequence
  Synthetic oligonucleotide
tgcatatgtataatcccatt

SEQ ID NO: 2673 - DNA, 20 bp, Artificial sequence
  Synthetic oligonucleotide
tgtttgcatatgtataatcc

SEQ ID NO: 2674 - DNA, 20 bp, Artificial sequence
  Synthetic oligonucleotide
catgtttgcatatgtataat

SEQ ID NO: 2675 - DNA, 20 bp, Artificial sequence
  Synthetic oligonucleotide
tcatgtttgcatatgtataa

SEQ ID NO: 2676 - DNA, 20 bp, Artificial sequence
  Synthetic oligonucleotide
gtcatgtttgcatatgtata

SEQ ID NO: 2677 - DNA, 20 bp, Artificial sequence
  Synthetic oligonucleotide
aatttttctctcacatcgat

SEQ ID NO: 2678 - DNA, 20 bp, Artificial sequence
  Synthetic oligonucleotide
ctaatttttctctcacatcg

SEQ ID NO: 2679 - DNA, 20 bp, Artificial sequence
  Synthetic oligonucleotide
tcgcctaatttttctctcac

SEQ ID NO: 2680 - DNA, 20 bp, Artificial sequence
  Synthetic oligonucleotide
aattcgcctaatttttctct

SEQ ID NO: 2681 - DNA, 20 bp, Artificial sequence
  Synthetic oligonucleotide
taatttttctctcacatcga

SEQ ID NO: 2682 - DNA, 20 bp, Artificial sequence
  Synthetic oligonucleotide
tgttttctttttctgctctt

SEQ ID NO: 2683 - DNA, 20 bp, Artificial sequence
  Synthetic oligonucleotide
tgctgttttacatttttttt

SEQ ID NO: 2684 - DNA, 20 bp, Artificial sequence
  Synthetic oligonucleotide
ggtgctgttttacatttttt

SEQ ID NO: 2685 - DNA, 20 bp, Artificial sequence
  Synthetic oligonucleotide
tcatatttgttacttccttt

SEQ ID NO: 2686 - DNA, 20 bp, Artificial sequence
  Synthetic oligonucleotide
atttttctctcacatcgatt

SEQ ID NO: 2687 - DNA, 20 bp, Artificial sequence
  Synthetic oligonucleotide
catttcttcagtgctttgta

1. An oligomeric compound comprising a modified oligonucleotide consisting of 8 to 80 linked nucleosides, wherein the nucleobase sequence of the modified oligonucleotide is at least 80% complementary to an equal length portion of an IFNAR1 nucleic acid, and wherein the modified oligonucleotide has at least one modification selected from a modified sugar moiety and a modified internucleoside linkage.

2. The oligomeric compound of claim 1, wherein the IFNAR1 nucleic acid has the nucleobase sequence of SEQ ID NO: 1 or SEQ ID NO: 2.

3. The oligomeric compound of claim 1, wherein the nucleobase sequence of the modified oligonucleotide is at least 80% complementary to an equal length portion within nucleobases 5085-5133, 19997-20061, 20076-20133, 20528-20616, 22294-22329, 22453-22476, 22595-22626, 25530-25565, 25606-25652, 25710-25767, 25768-25827, 28421-28468, 29924-29949, 29968-30021, 31072-31096, 31792-31837, 32353-32386, or 35016-35042 of SEQ ID NO: 1.

4. (canceled)

5. The oligomeric compound of claim 1, wherein the nucleobase sequence of the modified oligonucleotide is at least 85%, at least 90%, at least 95%, or 100% complementary to an equal length portion of the IFNAR1 nucleic acid.

6. An oligomeric compound comprising a modified oligonucleotide consisting of 8 to 80 linked nucleosides, wherein the nucleobase sequence of the modified oligonucleotide comprises at least 8, at least 9, at least 10, at least 11, at least 12, at least 13, at least 14, at least 15, or at least 16 contiguous nucleobases of any of the nucleobase sequences of:
SEQ ID NOs: 31, 33, 37, 69, 376, 411, 528, 616, 709, 766, 838, and 945;
SEQ ID NOs: 13, 15, 18, 116, 187, 1604, 1657, 1779, 1809, 1868, 1955, 2079, 2156, 2231, 2304, 2334, 2434, 2531, 2669, 2670, and 2669;
SEQ ID NOs: 709, 714, 811, 818, 933, 943, 1004, 1017, 1091, 1120, 1240, 1266, 1416, 1424, 2556, 2557, 2664, 2665, 2666, 2667, 2668, and 2682;
SEQ ID NOs: 2040, 1952, 1980, 2069, 2164, 2195, 2272, 2299, 2388, 2641, 2642, 2643, 2644, 2645, 2646, 2683, and 2684;
SEQ ID NOs: 440, 525, 607, 677, 783, and 850;
SEQ ID NOs: 1210, 1317, 1366, 1449, and 2679;
SEQ ID NOs: 22, 1985, 2059, 2157, 2199, and 2574;
SEQ ID NOs: 67, 71, 1836, 1887, 1980, 2029, 2115, 2242, 2253, and 2394;
SEQ ID NOs: 201, 287, 341, 415, 547, 587, 676, 754, 2659, 2660, 2661, 2662, 2663, and 2687;
SEQ ID NOs: 139, 229, 275, 369, 468, 540, 581, 691, 773, 790, 900, 1013, 1024, and 2566;
SEQ ID NOs: 80, 450, 532, 559, 643, 772, 842, 895, 1008, 1065, 1111, 1200, 1247, 1377, and 2637;
SEQ ID NOs: 21, 30, 33, 449, 522, 617, and 660;
SEQ ID NOs: 78, 693, 759, 799, and 875;
SEQ ID NOs: 1500, 1625, 1677, 1733, 1790, 1896, 1981, 2036, 2106, 2217, 2620, 2625, 2636, 2654, 2655, 2656, 2657, 2658, and 2685;
SEQ ID NOs: 125, 210, 289, 335, 2509, and 2614;
SEQ ID NOs: 1345, 1452, 1477, 1626, 1685, 1775, 1838, 1866, 2014, and 2083;
SEQ ID NOs: 99, 2151, 2210, 2320, 2353, 2408, and 2483; and
SEQ ID NOs: 1814, 1933, 1962, 2056, 2130, and 2237,
wherein the modified oligonucleotide has at least one modification selected from a modified sugar moiety and a modified internucleoside linkage.

7.-13. (canceled)

14. The oligomeric compound of claim 6, wherein the nucleobase sequence of the modified oligonucleotide is at least 85%, at least 90%, at least 95%, or 100% complementary to an equal length portion of an IFNAR1 nucleic acid, wherein the IFNAR1 nucleic acid has the nucleobase sequence of SEQ ID NO: 1 or SEQ ID NO: 2.

15. The oligomeric compound of claim 6, wherein the modified oligonucleotide consists of 10 to 25, 10 to 30, 10 to 50, 12 to 20, 12 to 25, 12 to 30, 12 to 50, 13 to 20, 13 to 25, 13 to 30, 13 to 50, 14 to 20, 14 to 25, 14 to 30, 14 to 50, 15 to 20, 15 to 25, 15 to 30, 15 to 50, 16 to 18, 16 to 20, 16 to 25, 16 to 30, 16 to 50, 17 to 20, 17 to 25, 17 to 30, 17 to 50, 18 to 20, 18 to 22, 18 to 25, 18 to 30, 18 to 50, 19 to 20, 19 to 25, 19 to 30, 19 to 50, 20 to 25, 20 to 30, 20 to 50, 21 to 25, 21 to 30, 21 to 50, 22 to 25, 22 to 30, 22 to 50, 23 to 25, 23 to 30, or 23 to 50 linked nucleosides.

16. The oligomeric compound of claim 15, wherein the modified oligonucleotide consists of 20 linked nucleosides.

17. The oligomeric compound of claim 6, wherein at least one nucleoside of the modified oligonucleotide comprises a modified sugar moiety.

18. The oligomeric compound of claim 17, wherein the modified sugar moiety comprises a bicyclic sugar moiety.

19. The oligomeric compound of claim 18, wherein the bicyclic sugar moiety comprises a 2′-4′ bridge selected from —O—CH₂— and —O—CH(CH₃)—.

20. The oligomeric compound of claim 17, wherein the modified sugar moiety comprises a non-bicyclic modified sugar moiety.

21. The oligomeric compound of claim 20, wherein the non-bicyclic modified sugar moiety is a 2′-MOE sugar moiety or 2′-OMe sugar moiety.

22. (canceled)

23. The oligomeric compound of claim 6, wherein the modified oligonucleotide comprises at least one modified internucleoside linkage.

24. The oligomeric compound of claim 23, wherein at least one modified internucleoside linkage is a phosphorothioate internucleoside linkage.

25. The oligomeric compound of claim 23, wherein each internucleoside linkage is a modified internucleoside linkage.

26. The oligomeric compound of claim 25, wherein each internucleoside linkage is a phosphorothioate internucleoside linkage.

27. The oligomeric compound of claim 23, wherein at least one internucleoside linkage of the modified oligonucleotide is a phosphodiester internucleoside linkage.

28. The oligomeric compound of claim 6, wherein each internucleoside linkage of the modified oligonucleotide is independently selected from a phosphodiester internucleoside linkage or a phosphorothioate internucleoside linkage.

29. The oligomeric compound of claim 23, wherein at least 10, at least 11, at least 12, at least 13, at least 14, at least 15, at least 16, at least 17, or at least 18 internucleoside linkages of the modified oligonucleotide are phosphorothioate internucleoside linkages.

30. The oligomeric compound of claim 23, wherein the modified oligonucleotide comprises an internucleoside linkage motif (5′ to 3′) selected from sssssssssssssss, soooossssssssssooss, sooosssssssssssooss, soosossssssssssooss, soossssssssssssooss, sosoossssssssssooss, sossossssssssssooss, sosssssssssssssooss, ssooossssssssssooss, sssoossssssssssooss, ssssossssssssssooss, sooooossssssssssoss, soooosssssssssssoss, sooosossssssssssoss, sooossssssssssssoss, soosoossssssssssoss, soossossssssssssoss, soosssssssssssssoss, sosooossssssssssoss, sossoossssssssssoss, sosssossssssssssoss, ssoooossssssssssoss, sssooossssssssssoss, and ssssoossssssssssoss, wherein each “s” represents a phosphorothioate internucleoside linkage and each “o” represents a phosphodiester internucleoside linkage.

31. The oligomeric compound of claim 6, wherein the modified oligonucleotide comprises at least one modified nucleobase.

32. The oligomeric compound of claim 31, wherein the modified nucleobase is 5-methyl cytosine.

33. The oligomeric compound of claim 32, wherein each cytosine is a 5-methyl cytosine.

34. The oligomeric compound of claim 6, wherein the modified oligonucleotide comprises a deoxy region.

35. The oligomeric compound of claim 34, wherein each nucleoside of the deoxy region is a 2′-β-D-deoxynucleoside.

36. The oligomeric compound of claim 34, wherein the deoxy region consists of 6, 7, 8, 9, 10, or 6-10 linked nucleosides.

37. The oligomeric compound of claim 34, wherein each nucleoside immediately adjacent to the deoxy region comprises a modified sugar moiety.

38. The oligomeric compound of claim 34, wherein the deoxy region is flanked on the 5′-side by a 5′-external region consisting of 1-6 linked 5′-external region nucleosides and on the 3′-side by a 3′-external region consisting of 1-6 linked 3′-external region nucleosides; wherein
the 3′-most nucleoside of the 5′ external region comprises a modified sugar moiety; and
the 5′-most nucleoside of the 3′ external region comprises a modified sugar moiety.

39. The oligomeric compound of claim 38, wherein each nucleoside of the 3′ external region comprises a modified sugar moiety.

40. The oligomeric compound of claim 38, wherein each nucleoside of the 5′ external region comprises a modified sugar moiety.

41. The oligomeric compound of claim 40, wherein the modified oligonucleotide has:
a 5′ external region consisting of 5 linked nucleosides;
a deoxy region consisting of 10 linked nucleosides; and
a 3′ external region consisting of 5 linked nucleosides;
wherein each of the 5′ external region nucleosides and each of the 3′ external region nucleosides is a 2′-MOE nucleoside.

42. The oligomeric compound of claim 40, wherein the modified oligonucleotide has:
a 5′ external region consisting of 6 linked nucleosides;
a deoxy region consisting of 10 linked nucleosides; and
a 3′ external region consisting of 4 linked nucleosides;
wherein each of the 5′ external region nucleosides and each of the 3′ external region nucleosides is a 2′-MOE nucleoside.

43. The oligomeric compound of claim 40, wherein the modified oligonucleotide has:
a 5′ external region consisting of 3 linked nucleosides;
a deoxy region consisting of 10 linked nucleosides; and
a 3′ external region consisting of 3 linked nucleosides;
wherein each of the 5′ external region nucleosides and each of the 3′ external region nucleosides is a cEt nucleoside.

44. The oligomeric compound of claim 40, wherein the modified oligonucleotide has:
a 5′ external region consisting of 1-6 linked nucleosides;
a deoxy region consisting of 6-10 linked nucleosides; and
a 3′ external region consisting of 1-6 linked nucleosides;
wherein each of the 5′ external region nucleosides and each of the 3′ external region nucleosides is a cEt nucleoside or a 2′-MOE nucleoside, and wherein each of the deoxy region nucleosides is a 2′-β-D-deoxynucleoside.

45. (canceled)

46. The oligomeric compound of claim 6, wherein the modified oligonucleotide has a sugar motif (5′ to 3′) selected from eeeeeddddddddddeeeee, eeeeeeddddddddddeeee, and kkkddddddddddkkk, wherein each “d” represents a 2′-β-D-deoxyribosyl sugar moiety, each “e” represents a 2′-MOE sugar moiety, and each “k” represents a cEt modified sugar moiety.

47-87. (canceled)

88. A population of oligomeric compounds of claim 6, wherein all of the phosphorothioate internucleoside linkages of the modified oligonucleotide are stereorandom.

89. An oligomeric duplex comprising a first oligomeric compound comprising a first modified oligonucleotide and a second oligomeric compound comprising a second modified oligonucleotide, wherein the first oligomeric compound is the oligomeric compound of claim 6, and wherein the second modified oligonucleotide consists of 8 to 80 linked nucleosides, wherein the nucleobase sequence of the second modified oligonucleotide comprises a complementary region of at least 8 nucleobases that is at least 90% complementary to an equal length portion of the first modified oligonucleotide.

90.-113. (canceled)

114. The oligomeric duplex of claim 89, wherein the second modified oligonucleotide consists of 10 to 25, 10 to 30, 10 to 50, 12 to 20, 12 to 25, 12 to 30, 12 to 50, 13 to 20, 13 to 25, 13 to 30, 13 to 50, 14 to 20, 14 to 25, 14 to 30, 14 to 50, 15 to 20, 15 to 25, 15 to 30, 15 to 50, 16 to 18, 16 to 20, 16 to 25, 16 to 30, 16 to 50, 17 to 20, 17 to 25, 17 to 30, 17 to 50, 18 to 20, 18 to 22, 18 to 25, 18 to 30, 18 to 50, 19 to 20, 19 to 25, 19 to 30, 19 to 50, 20 to 25, 20 to 30, 20 to 50, 21 to 25, 21 to 30, 21 to 50, 22 to 25, 22 to 30, 22 to 50, 23 to 25, 23 to 30, or 23 to 50 linked nucleosides.

115.-118. (canceled)

119. A pharmaceutical composition comprising the oligomeric compound of claim 1, and a pharmaceutically acceptable diluent or carrier.

120. The pharmaceutical composition of claim 119, wherein the pharmaceutically acceptable diluent is phosphate-buffered saline or artificial cerebrospinal fluid.

121.-122. (canceled)

123. A method of treating a disease associated with type I interferon signaling comprising administering to a subject having a disease associated with type I interferon signaling a therapeutically effective amount of the oligomeric compound of claim 1.

124. The method of claim 123, wherein the disease associated with type I interferon signaling is Aicardi-Goutières Syndrome, stroke, neuropsychiatric systemic lupus erythematosus, neuroinflammation following traumatic brain injury, neuro-autoimmune disorders, Alzheimer's disease, post-operative delirium and cognitive decline, cranial radiation-induced cognitive decline, viral infection-induced cognitive decline, neuromyelitis optica, or ataxia telangiectasia.

125. The method of claim 123, wherein the disease is associated with an elevated level of interferon-alpha in the subject.

126. The method of claim 123, wherein the subject has a mutation in a gene selected from TREX1, RNASEH2A, RNASEH2B, RNASEH2C, SAMHD1, ADAR1, MDA5, USP18, LSM11, and RNU7-1.

127. The method of claim 123, wherein administering the oligomeric compound reduces seizures, dystonia, spasticity, white matter abnormalities, T cell infiltration, B cell infiltration, striatal necrosis, brain atrophy, basal ganglia calcification, or microencephaly in the subject; or improves feeding, motor development, language development, or social skill development in the subject.

128. The method of claim 123, wherein administering the oligomeric compound reduces interferon alpha and/or lymphocytosis in the cerebrospinal fluid of the subject.

129. The method of claim 123, wherein the subject is human.

130.-136. (canceled)

137. A pharmaceutical composition comprising the oligomeric compound of claim 6, and a pharmaceutically acceptable diluent or carrier.

138. The pharmaceutical composition of claim 137, wherein the pharmaceutically acceptable diluent is phosphate-buffered saline or artificial cerebrospinal fluid.

139. A method of treating a disease associated with type I interferon signaling comprising administering to a subject having a disease associated with type I interferon signaling a therapeutically effective amount of the oligomeric compound of claim 6.

140. The method of claim 139, wherein the disease associated with type I interferon signaling is Aicardi-Goutières Syndrome, stroke, neuropsychiatric systemic lupus erythematosus, neuroinflammation following traumatic brain injury, neuro-autoimmune disorders, Alzheimer's disease, post-operative delirium and cognitive decline, cranial radiation-induced cognitive decline, viral infection-induced cognitive decline, neuromyelitis optica, or ataxia telangiectasia.

141. The method of claim 139, wherein the disease is associated with an elevated level of interferon-alpha in the subject.

142. The method of claim 139, wherein the subject has a mutation in a gene selected from TREX1, RNASEH2A, RNASEH2B, RNASEH2C, SAMHD1, ADAR1, MDA5, USP18, LSM11, and RNU7-1.

143. The method of claim 139, wherein administering the oligomeric compound reduces seizures, dystonia, spasticity, white matter abnormalities, T cell infiltration, B cell infiltration, striatal necrosis, brain atrophy, basal ganglia calcification, or microencephaly in the subject; or improves feeding, motor development, language development, or social skill development in the subject.

144. The method of claim 139, wherein administering the oligomeric compound reduces interferon alpha and/or lymphocytosis in the cerebrospinal fluid of the subject.

145. The method of claim 139, wherein the subject is human.
